(19) United States
(12) Patent Application Publication
(10) Pub. No.: US 2017/0342500 A1
(43) Pub. Date: Nov. 30, 2017

(54) METHOD FOR IDENTIFICATION OF TISSUE OR ORGAN LOCALIZATION OF A TUMOUR

(71) Applicant: Danmarks Tekniske Universitet, Kgs. Lyngby (DK)

(72) Inventors: Andrea Marion Marquard, Copenhagen N (DK); Aron Charles Eklund, Copenhagen Ø (DK); Nicolai Juul Birkbak, London (GB); Zoltan Imre Szallasi, Boston, MA (US)

(21) Appl. No.: 15/537,645

(22) PCT Filed: Dec. 18, 2015
(86) PCT No.: PCT/EP2015/080411

§ 371 Date: Jun. 19, 2017

(30) Foreign Application Priority Data
Dec. 19, 2014 (EP) 14199179.4

(51) Int. Cl. C12Q 1/68

(52) U.S. Cl. CPC C12Q 1/6886; C12Q 2600/178; C12Q 2600/112; C12Q 2600/156

(57) ABSTRACT

The invention relates to a method for predicting the localization of a primary tumour, wherein said method comprises the use of genomic profile data, and wherein the method is capable of predicting the type of cancer by a classification score ranking among a variety of the possible tumour types.

### FIELD OF INVENTION

[0001] The invention relates to a method for predicting the localization of a primary tumour, wherein said method comprises the use of genomic profile data, and wherein the method is capable of predicting the type of cancer by a classification score ranking among a variety of the possible tumour types.

### BACKGROUND OF INVENTION

[0002] Cancer, also known as a malignant tumour, is a widespread disease with several millions of new cases globally each year. More than 8 million people died of cancer worldwide in 2012.

[0003] The mortality from cancer can be reduced by an early detection. If the tumour is located early, it can be removed and/or a treatment can be tailored to the specific cancer type.

[0004] However, in many cases of new cancer patients, the patients present with metastatic cancer for which the primary tumour (tissue wherein the cancer has started) cannot be readily located.

[0005] To initiate curative treatment, it is advantageous to locate the primary tumour. Diagnosis of cancer with unknown primary origin often involves many time consuming and costly clinical tests, since a selection of laboratory or imaging tests has to be made in different tissues in order to localize the primary tumour. Furthermore, in 2-4% of the cases, the primary tumour is never located.

[0006] Cancer arises as a result of changes (e.g. mutations) in the genomes of cells within the tissue of the primary origin of cancer, and these changes are reflected in the RNA and proteins produced by a cancer cell, as well as in the regulation of expression of genes in the cancer cell. Thus, cancer cells such as those of a primary tumour, or of a metastatic tumour, hold information regarding which genomic changes has resulted in cancer. It is further known that tumours located in variety of organs shed the mutated DNA into e.g. the bloodstream, also known as circulating tumour DNA (ctDNA), and in some cases tumour DNA is also present in other bodily fluids, such as urine.

[0007] Copy number variations (CNV) in genomic regions or genes have also been found previously to be associated with cancer. CNV is alterations of the genomes, reflected as the structural variation in the number of copies of one or more sections of the DNA. The alterations may comprise deletion of sections of the DNA, or duplication of sections of the DNA.

[0008] Several different types of genomic changes have been associated with specific cancer types. F. Dietlein and W. Eschner have described a method with the purpose of identifying primary tumour origin based on mutation in specific genes. However, the input data used in this method is restricted to only use mutational information for a gene if it can be unambiguously associated with a single cancer type. The method does not take into account copy number variation in the cancer_{;} nor the frequency of specific types of nucleotide base substitutions regardless of where in the genome they occur.

[0009] WO 09105154 describes a method to diagnose cancer types showing gene copy number variations (CNV), for example lymphoma, leukemia, glioma, breast cancer or lung cancer based on expression data from at least 5 nucleic acid sequences encoding proteins from a patient. The method disclosed in WO 09105154 does not involve a method that uses the combination of mutational status in genes mutated in cancer and CNV information. It does also not mention a method wherein the classification scores of different cancer types are ranked.

[0010] Beroukhim et al. have studied somatic copy number variation alterations (SCNA) across human cancers, and concluded that most of the significant SCNAs within any single cancer type tend to be found in other cancer types as well.

[0011] Increased frequency of specific types of single substitutions have previously been observed and described in the prior art (Alexandrov 2013 a and b, and WO080211288). Alexandrov 2013a discloses that it is possible to derive 20 distinct mutational signatures, wherein some are present in many cancer types. These documents do not disclose the use of such information in combination with mutation status of genes mutated in cancer, or a method wherein the classification scores of different cancer types are ranked and used for prediction.

### SUMMARY OF INVENTION

[0012] Considering the prior art described above, it is an object of the present invention to provide a method that can predict the localization of a primary tumour selected among a plurality of cancer types with improved accuracy.

[0013] The object can be achieved by a method for prediction of a specific type of cancer in a subject using an acquired bodily sample from said subject, said method comprising the steps of;

[0014] a) providing biological sequences derived from said bodily sample,

[0015] b) deriving the mutation status of specific genes that are mutated in cancer from said biological sequences compared to a normal sample,

[0016] c) calculating one or more of the following types of information i) to iii) from said biological sequences:
[0017] i) single base substitution frequency wherein the identity of the two bases flanking said substitution is not taken into account,
[0018] ii) single base substitution frequency in triplets of nucleotide bases, wherein the identity of the two bases flanking the substitution is taken into account,
[0019] iii) copy number variation (CNV) of genomic regions and/or genes compared to the copy number of the same regions and/or genes in a normal sample

[0020] d) calculating a classification score for the presence of each of a plurality of cancer types in said subject, wherein said classification score calculation is based on the mutation status derived from step b) in combination with the one or more of the information types i) to iii) being calculated in step c),

[0021] e) ranking the plurality of cancer types based on the classification score of step d), and f) predicting the specific type of cancer in said subject based on the ranking of step e).

[0022] Thus in one embodiment of the present invention, said method calculates said classification score based on a combination of the mutation status of step b) in combination with one or more of the information types i) to iii) of step c) such as for example by using the mutation status derived from step b) in combination with information types i) and/or ii) of step c), or by using a combination of the mutation status derived from step b) in combination with information type ii) of step c), or by using a combination of the mutation status derived from step b) in combination with information type iii) of step c), or by using combination of the mutation status derived from step b) in combination with information type iii) and one or more of the information types i) and ii) of step c), or by using a combination of the mutation status derived from step b) in combination with information types iii) and ii) of step c), or by using a combination of the mutation status derived from step b) in combination with information types iii) and i) of step c).

[0023] In a preferred embodiment of the invention, said classification score is calculated by using a combination of the mutation status of step b) in combination with one or more of information types ii) and iii) of step c).

[0024] In the method according to the present invention, said biological sequence may be a DNA, mRNA or protein sequence obtained from said bodily sample, wherein a DNA and/or mRNA sequence obtained from said bodily sample is more preferred.

[0025] In the methods of the present invention, both synonymous and non-synonymous mutations may be used for deriving said mutation status, wherein non-synonymous mutations are more preferred.

[0026] In one embodiment of the present invention, the mutation status of step b) is based on mutation status of genes that are recurrently mutated in association with cancer, such as for example the set of genes encoding the sequences of SEQ ID NO: 1 to 231, which is more preferred.

[0027] In one embodiment of he method according to the present invention, at least one of steps b) to c) is performed by a client, and wherein said client is capable of sending to a server one or more types of data used in the methods of the invention selected from the group consisting of genomic profile, mutation status, information type i), information type ii) information type iii). Typically, the server then returns to the client information about classification score and ranking.

[0028] In one embodiment of the method according to the present invention, at least one of steps b) to e) is performed by a server, and wherein said server is capable of receiving from a client one or more types of data according to claim 1 selected from the group consisting of genomic profile, mutation status, information type i), information type ii) information type iii). Typically, the server then returns to the client information about classification score and ranking.

[0029] In another aspect of the invention a computer program product is provided, said computer program product having instructions which when executed by a computing device or system causes the computing device or system to carry out the method according to the present invention.

[0030] In another aspect of the invention a data-processing system is provided having means for carrying out the method according to the present invention.

[0031] In another aspect of the invention a computer readable medium is provided having stored thereon a computer program product according to the present invention.

[0032] With the method according to the present invention it is possible to predict the tissue of origin (tissue type or cancer type) of a tumour metastasis with improved accuracy. This is particularly useful in the case of metastases of unknown origin or cancer of unknown primary. The improved accuracy provided by the present method can enable a more efficient clinical diagnosis of the primary tumour. Thereby the number of diagnostic tests needed to diagnose the primary cancer may be reduced, as well as the costs for the diagnostic procedure. Furthermore a more efficient diagnosis can aid to result in a faster and more efficient treatment which can reduce the mortality rate.

[0033] The methods of the current application may be used in connection with selecting a treatment regime by predicting the most likely origin of the cancer tissue and selecting a treatment regime based on this knowledge. As the predictive methods provide a rank with the most likely origins of the cancer, a treatment regime may be selected based on the top ranking cancer or on the topmost two or three cancers based on the classification score.

[0034] Another advantage of the method relates to the method providing a classification score ranking of each of the variety of cancer types predicted by the method. The ranking provides another aspect to the accuracy, since a user will know which types of cancer is ranking second and third on the ranked list, and will therefore have a good starting point for further clinical tests, in case the predicted cancer type with the highest rank cannot be diagnosed clinically in a patient.

[0035] Furthermore, said method can be based on a bodily sample obtained by using minimally invasive or non-invasive methods, such as for example a sample from a blood or urine sample. This will be beneficial for each individual patient as well as the efficiency of the medical services. It is further imagined that the invention will furthermore be applicable for screening and monitoring individuals with high risk of cancer, wherein cancer has not yet been diagnosed, due to the fact that it can be based on minimally invasive or non-invasive method.

[0036] In one embodiment, the method further includes calculation of a confidence score, for example a confidence score based on the difference between the top two ranking cancer types. This can help to indicate the if there are only minor differences in the classification score between the top ranking cancer types and thereby help to indicate if the second or third ranking cancer type should also be considered for clinical testing.

### DESCRIPTION OF DRAWINGS

[0037] The invention will in the following be described in greater detail with reference to the accompanying drawings:

[0038] FIG. 1. Outline of classifier development and validation of a method according to one embodiment of the invention. Development of final model, and feature selection, using five-fold internal cross validation, with final evaluation on a separate test set.

[0039] FIG. 2. Usage of a final method according to one embodiment of the invention on new samples. Somatic mutation data is used to infer the mutation status of a set of cancer genes and to calculate the distributions of either 6 or 96 classes of base substitutions (i.e. single base substitution wherein the two flanking bases are not taken into account, and single base substitution wherein the two flanking bases are taken into account). When CNV profiles are available, this is used to infer any copy number changes in the same set of cancer genes. These features are combined and provided to a set of random forest classifiers, one per cancer type, and the output classification scores are compared to establish the classification score rank of the possible cancer types for a given set of new samples.

[0040] FIG. 3. Performance of a method according to the invention in six and ten different tissues. Random forest ensembles were trained using the feature sets shown in the tables below each bar, and classification accuracy was evaluated by cross-validation. “Mutations” denote mutational status, “CNVs” denote copy number variation, “TripletBaseSubs” denote single base substitution wherein the two flanking bases are taken into account and “SingleBaseSubs” denote single base substitution wherein the two flanking bases are not taken into account. Adequate CNV data was available in only six of ten primary sites; thus we analyzed these six sites separately when considering CNV. Left: Classification accuracy when excluding CNV data and distinguishing between ten primary sites. Right: Classification accuracy when including CNV data and distinguishing between six primary sites. This figure shows that each of the three types of features enable better-than-random classification accuracy, and that combining these features enables even better accuracy. The overall accuracy for the combination of mutation status with either one of the types of single base substitution frequency was remarkably improved compared to methods using only one of these features, Trinucleotide base substitutions on their own have better accuracy than single base substitutions, and the best accuracy is achieved when these are combined with mutation status and CNVs. When CNVs are not available, the highest accuracy is attained with a combination of mutation status and trinucleotide base substitutions.

[0041] FIG. 4. Performance of final classifiers on the test data, according to the confidence score, defined as the difference between the top two ranking tissue classification scores. A. C: Classification accuracy increases with confidence score. Boxes and bars indicate the accuracy and 95% confidence interval for each bin of samples. Grey columns indicate the number of samples in each bin. B, D: Accuracy vs. fraction of samples called. Accuracy (solid line) and 95% confidence interval (grey region) of the corresponding fraction of tumours with highest confidence score. The fraction of tumours for which an accuracy of 95% can be achieved is shown by a grey box with whiskers at the bottom. These figures show that the confidence score can be used to select the most confident predictions; when CNVs are available (C, D), the top 75% of predictions with highest confidence have a combined accuracy of 95%. When CNVs are not available (A, B) our method has an accuracy of >85% on more than half the tumours.

[0042] FIG. 5. Performance of final classifiers in ranking primary sites. For each sample the primary sites were ordered from highest to lowest classification score, and each point indicates the percentage of samples (ordinate) where the correct primary cancer tissue type was found within the first specified number of tissue types (abscissa) when prioritising the tissue types by using our method (filled circles or line), by most frequent site (triangles) or at random (squares). The performance of the method on validation data sets with known distributions of primary cancer tissue types is estimated according to the “expected” site-specific accuracies based on the test data (crosses).

[0043] A: Performance of the model using mutation status in combination with trinucleotide single base substitution frequency (excluding CNV data) on the test set of ten primary cancer tissue types.

[0044] B: Performance of the method using mutation status in combination with trinucleotide single base substitution frequency and CNV data on the reduced test set of six primary cancer tissue types.

[0045] C: Performance of the method using mutation status in combination with trinucleotide single base substitution frequency (excluding CNV data) on the subset of COSMIC v70 that was not present in COSMIC v68 used for training.

[0046] D: Performance of the model using mutation status in combination with trinucleotide single base substitution frequency (excluding CNV data) on the SAFIR trial metastatic breast tumours.

[0047] A and B show that our methods correctly classify many more tumours than a random classifier would, or than a classifier that ranked the sites by their frequency in the data set would. C and D show that the accuracy on our validation data sets is comparable to the test set COSMIC 70. The actual validation accuracy is slightly lower than the “expected” accuracy calculated based on sensitivity of the specific cancer tissue type, this is not surprising due to differences in data generation and analysis, and the actual accuracy is still significantly better than a random classifier.

[0048] FIG. 6. Performance comparison of four machine learning methods used for the method of the present invention. The mean±SD of the area under the curve (AUC) of the receiver operating characteristics (ROC) curve is shown for each of ten primary tissue types, across 5-fold cross validation of stepwise logistic regression, support vector machines, artificial neural networks and random forests. This demonstrates that the method of the invention can be used successfully in combination with a range of different machine learning methods. The figure further demonstrates that in nine out of ten primary cancer tissue types, the random forest method achieved better classification performance than the other three methods, as evaluated by the AUC value, which is a well-established measure of binary classification performance.

[0049] FIG. 7. Confidence scores for all tumours in the cross-validation test sets, split into groups according to whether the top ranking primary cancer tissue type was correct or incorrect for the method using somatic mutation status in combination ii) single nucleotide substitutions taking the identity of the two flanking bases into account and further in combination with CNV information (type iii). The AUC value of the first method was 0.88. A similar plot was made for the method using somatic mutation status in combination with single nucleotide substitutions taking the identity of the two flanking bases. The AUC value of that method was 0.79. The AUC value reflects how well the confidence score can differentiate classifications that are likely to be correct from those that are less certain. The high AUC values show that our confidence score performs well in separating high confidence from less confident predictions.

[0050] FIG. 8. Flowchart for diagnosing cancer patients, including metastases of unknown origin (MUO) and cancer of unknown primary (CUP).

### DETAILED DESCRIPTION OF THE INVENTION

[0051] The term “cancer” as used herein is meant to encompass any cancer, neoplastic and preneoplastic disease.

[0052] By the term “classifier” as used herein is meant a method to identify to which set of categories (such as cancer types) a new observation belongs, where said method is based on a training set of data containing observations whose category membership is known. A classifier may be based on a machine learning method.

[0053] By the term “machine learning method” as used herein is meant an algorithm operated by a model based on inputs, and using that input to make predictions or decisions, rather than following explicitly programmed instructions. The machine (computer) is presented with example inputs and their desired outputs, and the goal is to learn a general rule that maps inputs to outputs. A commonly known example of such is email spam filtering, where the learning algorithm is presented with email messages labeled beforehand as “spam” or “not spam”, to produce a computer program that labels unseen messages as either spam or not.

[0054] “Biological sequences” according to the present invention may be any type of biological sequence of DNA, RNA or a protein sequence. Such sequences derived from cancer tissue may be compared to corresponding biological sequences from non-cancer tissue and used to derive or calculate different types of information, such as mutation status, single base substitution frequency, single base substitution frequency in triplets of nucleotide bases, and copy number variation (CNV).

[0055] By the term “bodily sample” as used herein is meant a sample of bodily material which includes biological sequences from the body wherefrom the sample is acquired. A bodily sample is for example a sample of bodily fluid or bodily tissue.

[0056] By the term “copy number variation (CNV)” as used herein is meant a change in the copy number status of a genomic region or segment such as a gene or set of adjacent genes, relative to a normal sample. Copy number variation results in the cell having an abnormal variation in the number of copies of one or more sections of the DNA.

[0057] By the term “normal sample” is meant a sample of bodily material of healthy or non-cancerous origin. Such a normal sample includes for example a sample of bodily tissue or bodily fluid. Common sources of normal samples are lymphocytes from peripheral blood samples, or tissue biopsies from healthy areas of the tissue or organ from where a matching tumour biopsy was taken. In the embodiments where the biological sequences are DNA sequences, a normal sample of non-cancerous origin may for example be derived from any non-cancerous bodily sample from a subject which comprises genomic DNA.

[0058] A normal sample may be a sample obtained from other human beings, in which case the biological sequences from a sample used for prediction of cancer tissue type in a subject are compared to a reference sequence from humans in general. The differences between the sequence from the subject and the sequence from the reference may reflect somatic mutations as well as population variations. Thus, in one embodiment of the present invention, one or more biological sequences of a sample to be tested in the method of the present invention are compared to biological sequences in a normal sample of another human being, such as for example one or more human reference sequences in databases.

[0059] When the normal sample is taken from the same subject, and even from the same tissue type as a tumour sample, the differences between the sequences from the tumour and normal sample reflect somatic mutations in the tumour genome compared to the germline genome of the subject. In a preferred embodiment of the present invention, the normal sample is derived from the same subject who is being tested using the method according to the invention. In another embodiment, the normal sample is derived from the same bodily tissue or fluid as the sample used for prediction of a specific type of cancer in a subject i.e. the comprising biological sequences from a tumour or cancer.

[0060] By the term “mutation status” as used herein is meant whether a gene is mutated or not compared to the gene in a normal sample. If any mutation is found, that gene will have status and be called as mutated. If no mutation is found, that gene will have status and be called as non-mutated.

[0061] By the term “single base substitution frequency” as used herein is meant the frequency of specific classes of single base substitutions or point mutations in an individual tumor genome. Single base mutation is a type of mutation that causes the replacement of a single base nucleotide with another nucleotide of the genetic material, DNA.

[0062] By the term “single base substitution frequency in triplets” as used herein is meant the frequency of specific classes of single base substitutions wherein the identity of the two flanking nucleotide bases are taken into account. One example is the frequency of substitution of the triplet of bases ACT wherein the middle base is substituted.

[0063] By the term “subject” is meant a subject which may potentially have cancer, such as for example an animal, a mammal, a primate or a human being.

### Prediction of Cancer Tissue Type

[0064] The present invention relates to a method wherein the mutational status in specific genes which are found to be mutated in cancer compared to the normal sample, is used in combination with one or more specific types of information selected from the group consisting of single base substitution frequency wherein the two flanking bases are not taking into account (information type i), single base substitution frequency in triplets of nucleotide bases wherein the two flanking bases are taking into account (information type ii); and copy number variation in genomic regions and/or genes and/or sets of genes compared to the copy number of the same genomic regions and/or genes and/or sets of genes in a normal sample, such as a healthy sample or a non-cancerous sample (information type iii). The mutation status and the remaining types of information as mentioned above can be calculated based on data of biological sequences from a cancerous cell. The inventors have surprisingly found that the combination of these specific types of information derived from cancer result in a high overall performance in a method for prediction of a specific cancer type in a subject, wherein the method provides a ranking of different cancer types.

[0065] In one embodiment of the present invention, the method calculates said classification score using at least a combination of mutation status with calculated single base substitution frequency information types i) and/or ii) of step c), for example the method may only use a combination of mutation status with single base substitution frequency information type as i) and/or ii) of step c).

[0066] In another embodiment of the present invention, the method calculates said classification score using at least a combination of mutation status with calculated single base substitution frequency information type ii) of step c), for example the method may only use only a combination of mutation status with calculated single base substitution frequency information type ii) of step c).

[0067] The inventors of the present method have surprisingly found that the predictive accuracy of the method can be increased by calculating copy number variation of genomic regions, and using this information in a method for predicting cancer according to the present invention.

[0068] In one embodiment of the present invention, the method calculates the classification score for each cancer type based on a combination of the mutation status derived from step b) in combination with information type iii) and one or more of the information types i) and ii) of step c), for example the method can in one embodiment calculate a classification score for each cancer type based on a combination of the mutation status derived from step b) in combination with information types iii) and i) of step c).

[0069] In an even more preferred embodiment, the method according to the invention calculates the classification score for each cancer type based on a combination of the mutation status derived from step b) in combination with information types iii) and ii) of step c).

[0070] A number of different biological sequences exist which may be used to derive information that is useful as input for the method according to the present invention. In one embodiment of the present invention, a biological sequence is a DNA, RNA or protein sequence obtained from a bodily sample comprising cancerous or non-cancerous material. In one other embodiment of the present invention, the biological sequence is a DNA and/or a mRNA sequence.

[0071] In a more preferred embodiment of the present invention, the biological sequence is a DNA sequence, such as a genomic sequence, a gene sequence, an exome sequence or a cDNA sequence.

[0072] The information derived from biological sequences and used for calculation of classification score according to the present invention relies on a comparison to biological sequences in a normal sample which comprises healthy or non-cancerous material, such as bodily fluid or tissue. However, natural variation may occur in corresponding biological sequences between subjects of given population. If the normal sample is derived from the same subject who is to be tested using the method of the present invention, it is envisaged that the predictive performance will increase due to a more efficient comparison of biological sequences. Therefore, in one embodiment of the present invention, biological sequences for both a normal sample and a bodily sample comprising cancer tissue or cancer biological sequences are provided from the same subject and used for the calculation of information types i) to iii) of step c) and for the mutation status of step b).

[0073] The predictive accuracy can be further improved by using additional data derived from cancerous samples. In one embodiment of the present invention, the method further includes the use of information of additional clinical or pathological features such as expression of tissue-characteristic mRNA or proteins, or the location of the metastasis in the body of a subject.

### Derivation of Mutation Status for Use in the Method of the Invention

[0074] Mutational status of genes which are mutated in cancer can provide valuable information regarding the type of cancer found in cancer cells or biological sequences of a bodily sample.

[0075] Mutations in a biological sequence can be determined by using methods which are commonly known in the art, such as DNA, RNA or protein sequencing, such as for example whole genome sequencing, targeted sequencing, exomic sequencing or hybridization-based methods and comparing the data to a normal sample.

[0076] Typically, a first step of identifying mutations in a biological sample involves sequence alignment of biological sequences derived from a sample of cancer material with a corresponding biological sequence from a reference or normal (or non-tumour) sample using conventional methods known in the art, such as, BLAST (Altschul et al 1990), BWA (Li and Durbin, 2009), Bowtie (Langmead et al 2009), or various combinations of substring index searching and/or dynamic programming. Based on the alignment, differences in the biological sequences can be used to determine if there are specific mutations or substitutions, insertions, deletions, or changed locations in the biological sequence of a cancer cell compared to the normal sample. Thus in a preferred embodiment of the present invention, the mutation status of biological sequences from a sample is derived by alignment of biological sequences.

[0077] In one embodiment of the present invention, the mutation status of a gene mutated in cancer is derived from a comparison of mRNA or cDNA sequences of the tumour specimen and/or normal specimen, and by mapping these changes to specific genes or genomic positions.

[0078] In another embodiment of the present invention, the mutation status of a gene mutated in cancer is derived by comparison of protein sequences by identifying amino acid positions in which a specific amino acid or sequence of amino acids has been modified, inserted, deleted, or changed location in the cancer specimen relative to the normal specimen, and by mapping these changes to specific genes or genomic positions.

[0079] In a preferred embodiment of the present invention, mutation status of a gene mutated in cancer is derived by comparison of genomic DNA sequences derived from a cancerous specimen and from a corresponding normal (or non-cancer) specimen, and by mapping/aligning these sequences to specific genomic locations.

[0080] When the biological sequences are DNA sequences, mutational status may be identified by obtaining genomic DNA sequences derived from a tumour specimen and from a corresponding normal (or non-tumour) specimen, and by mapping/aligning these sequences to specific genomic locations using programs such as bowtie (Langmead et al 2012), and by identifying genomic positions in which a specific base or sequence of bases has been modified, inserted, deleted, or changed location in the tumour specimen relative to the normal specimen, using programs such as MuTect (Cibulskis et al 2013) or VarScan (Koboldt et al 2012).

[0081] The mutation status of any gene can be evaluated and used in the method according to the present invention. However, mutations may occur which are not related to cancer. Such mutations may result in a reduced accuracy of prediction. Therefore, the method of present invention preferably uses mutation status of genes that are mutated in association with cancer. One way of determining such genes is by using the method or components of the methods as described by Lawrence et al 2013, which involves identifying genes that are mutated more frequently than expected from the background mutation rate in any individual cancer type, as identified through genomic analysis of several individual tumours. In one embodiment of the present invention, the mutation status is derived in genes that are mutated in cancer, wherein the selected genes are mutated more frequently than expected from the background mutation rate in any individual cancer type, as identified through genomic analysis of several individual tumours.

[0082] In an even more preferred embodiment, the method according to the present invention uses mutation status of a specific set of selected genes which have been determined as being frequently mutated in cancer such as the set of genes encoding the coding DNA sequences (CDS) of SEQ ID NO: 1 to 231 or in the sequences of SEQ ID NO: 1 to 231, which are shown in Table 1 below. The column named HGNC ID(s) below refers to human genome version GRCh38.

TABLE 1

| | Ensembl | HGNC | Entrez |
|---|---|---|---|
| SEQ ID NO | Gene ID | ID(s) | Gene ID |
| SEQ ID NO: 1 | ENSG00000122729 | HGNC: 117 | 48 |
| SEQ ID NO: 2 | ENSG00000135503 | HGNC: 172 | 91 |
| SEQ ID NO: 3 | ENSG00000101126 | HGNC: 15766 | 23394 |
| SEQ ID NO: 4 | ENSG00000129474 | HGNC: 20250 | 84962 |
| SEQ ID NO: 5 | ENSG00000142208 | HGNC: 391 | 207 |
| SEQ ID NO: 6 | ENSG00000171094 | HGNC: 427 | 238 |
| SEQ ID NO: 7 | ENSG00000239382 | HGNC: 28243 | 84964 |
| SEQ ID NO: 8 | ENSG00000198796 | HGNC: 20565 | 115701 |
| SEQ ID NO: 9 | ENSG00000151150 | HGNC: 494 | 288 |
| SEQ ID NO: 10 | ENSG00000134982 | HGNC: 583 | 324 |
| SEQ ID NO: 11 | ENSG00000160007 | HGNC: 4591 | 2909 |
| SEQ ID NO: 12 | ENSG00000117713 | HGNC: 11110 | 8289 |
| SEQ ID NO: 13 | ENSG00000189079 | HGNC: 18037 | 196528 |
| SEQ ID NO: 14 | ENSG00000150347 | HGNC: 17362 | 84159 |
| SEQ ID NO: 15 | ENSG00000171456 | HGNC: 18318 | 171023 |
| SEQ ID NO: 16 | ENSG00000149311 | HGNC: 795 | 472 |
| SEQ ID NO: 17 | ENSG00000168646 | HGNC: 904 | 8313 |
| SEQ ID NO: 18 | ENSG00000160862 | HGNC: 910 | 563 |
| SEQ ID NO: 19 | ENSG00000166710 | HGNC: 914 | 567 |
| SEQ ID NO: 20 | ENSG00000163930 | HGNC: 950 | 8314 |
| SEQ ID NO: 21 | ENSG00000029363 | HGNC: 16863 | 9774 |
| SEQ ID NO: 22 | ENSG00000183337 | HGNC: 20893 | 54880 |
| SEQ ID NO: 23 | ENSG00000157764 | HGNC: 1097 | 673 |
| SEQ ID NO: 24 | ENSG00000012048 | HGNC: 1100 | 672 |
| SEQ ID NO: 25 | ENSG00000187068 | HGNC: 33731 | 285382 |
| SEQ ID NO: 26 | ENSG00000112186 | HGNC: 20039 | 10486 |
| SEQ ID NO: 27 | ENSG00000198286 | HGNC: 16393 | 84433 |
| SEQ ID NO: 28 | ENSG00000064012 | HGNC: 1509 | 841 |
| SEQ ID NO: 29 | ENSG00000067955 | HGNC: 1539 | 865 |
| SEQ ID NO: 30 | ENSG00000147144 | HGNC: 28910 | 90060 |
| SEQ ID NO: 31 | ENSG00000108091 | HGNC: 18782 | 8030 |
| SEQ ID NO: 32 | ENSG00000110092 | HGNC: 1582 | 595 |
| SEQ ID NO: 33 | ENSG00000158473 | HGNC: 1637 | 912 |
| SEQ ID NO: 34 | ENSG00000125726 | HGNC: 11937 | 970 |
| SEQ ID NO: 35 | ENSG00000007312 | HGNC: 1699 | 974 |
| SEQ ID NO: 36 | ENSG00000004897 | HGNC: 1728 | 996 |
| SEQ ID NO: 37 | ENSG00000039068 | HGNC: 1748 | 999 |
| SEQ ID NO: 38 | ENSG00000167258 | HGNC: 24224 | 51755 |
| SEQ ID NO: 39 | ENSG00000135446 | HGNC: 1773 | 1019 |
| SEQ ID NO: 40 | ENSG00000124762 | HGNC: 1784 | 1026 |
| SEQ ID NO: 41 | ENSG00000111276 | HGNC: 1785 | 1027 |
| SEQ ID NO: 42 | ENSG00000147889 | HGNC: 1787 | 1029 |
| SEQ ID NO: 43 | ENSG00000245848 | HGNC: 1833 | 1050 |
| SEQ ID NO: 44 | ENSG00000111642 | HGNC: 1919 | 1108 |
| SEQ ID NO: 45 | ENSG00000100888 | HGNC: 20153 | 57680 |
| SEQ ID NO: 46 | ENSG00000176571 | HGNC: 26663 | 168975 |
| SEQ ID NO: 47 | ENSG00000130635 | HGNC: 2209 | 1289 |
| SEQ ID NO: 48 | ENSG00000080573 | HGNC: 14864 | 50509 |
| SEQ ID NO: 49 | ENSG00000005339 | HGNC: 2348 | 1387 |
| SEQ ID NO: 50 | ENSG00000102974 | HGNC: 13723 | 10664 |
| SEQ ID NO: 51 | ENSG00000168036 | HGNC: 2514 | 1499 |
| SEQ ID NO: 52 | ENSG00000158290 | HGNC: 2555 | 8450 |
| SEQ ID NO: 53 | ENSG00000257923 | HGNC: 2557 | 1523 |
| SEQ ID NO: 54 | ENSG00000215301 | HGNC: 2745 | 1654 |
| SEQ ID NO: 55 | ENSG00000108654 | HGNC: 2746 | 1655 |
| SEQ ID NO: 56 | ENSG00000131504 | HGNC: 2876 | 1729 |
| SEQ ID NO: 57 | ENSG00000083520 | HGNC: 20604 | 22894 |
| SEQ ID NO: 58 | ENSG00000187957 | HGNC: 24456 | 92737 |
| SEQ ID NO: 59 | ENSG00000119772 | HGNC: 2978 | 1788 |
| SEQ ID NO: 60 | ENSG00000146648 | HGNC: 3236 | 1956 |
| SEQ ID NO: 61 | ENSG00000125977 | HGNC: 3266 | 8894 |
| SEQ ID NO: 62 | ENSG00000163435 | HGNC: 3318 | 1999 |
| SEQ ID NO: 63 | ENSG00000100393 | HGNC: 3373 | 2033 |
| SEQ ID NO: 64 | ENSG00000142627 | HGNC: 3386 | 1969 |
| SEQ ID NO: 65 | ENSG00000141736 | HGNC: 3430 | 2064 |
| SEQ ID NO: 66 | ENSG00000065361 | HGNC: 3431 | 2065 |
| SEQ ID NO: 67 | ENSG00000104884 | HGNC: 3434 | 2068 |
| SEQ ID NO: 68 | ENSG00000106462 | HGNC: 3527 | 2146 |
| SEQ ID NO: 69 | ENSG00000092820 | HGNC: 12691 | 7430 |
| SEQ ID NO: 70 | ENSG00000183508 | HGNC: 24712 | 54855 |
| SEQ ID NO: 71 | ENSG00000083857 | HGNC: 3595 | 2195 |
| SEQ ID NO: 72 | ENSG00000109670 | HGNC: 16712 | 55294 |
| SEQ ID NO: 73 | ENSG00000066468 | HGNC: 3689 | 2263 |
| SEQ ID NO: 74 | ENSG00000068078 | HGNC: 3690 | 2261 |
| SEQ ID NO: 75 | ENSG00000143631 | HGNC: 3748 | 2312 |
| SEQ ID NO: 76 | ENSG00000122025 | HGNC: 3765 | 2322 |
| SEQ ID NO: 77 | ENSG00000129514 | HGNC: 5021 | 3169 |
| SEQ ID NO: 78 | ENSG00000164379 | HGNC: 20951 | 94234 |
| SEQ ID NO: 79 | ENSG00000165694 | HGNC: 8079 | 90167 |
| SEQ ID NO: 80 | ENSG00000107485 | HGNC: 4172 | 2625 |
| SEQ ID NO: 81 | ENSG00000120063 | HGNC: 4381 | 10672 |
| SEQ ID NO: 82 | ENSG00000111670 | HGNC: 29670 | 79158 |
| SEQ ID NO: 83 | ENSG00000120053 | HGNC: 4432 | 2805 |
| SEQ ID NO: 84 | ENSG00000169919 | HGNC: 4696 | 2990 |
| SEQ ID NO: 85 | ENSG00000168298 | HGNC: 4718 | 3008 |
| SEQ ID NO: 86 | ENSG00000206503 | HGNC: 4931 | 3105 |
| SEQ ID NO: 87 | ENSG00000234745 | HGNC: 4932 | 3106 |
| SEQ ID NO: 88 | ENSG00000174775 | HGNC: 5173 | 3265 |
| SEQ ID NO: 89 | ENSG00000138413 | HGNC: 5382 | 3417 |
| SEQ ID NO: 90 | ENSG00000182054 | HGNC: 5383 | 3418 |
| SEQ ID NO: 91 | ENSG00000168685 | HGNC: 6024 | 3575 |
| SEQ ID NO: 92 | ENSG00000153487 | HGNC: 6062 | 3621 |
| SEQ ID NO: 93 | ENSG00000165458 | HGNC: 6080 | 3636 |
| SEQ ID NO: 94 | ENSG00000138785 | HGNC: 25067 | 57117 |
| SEQ ID NO: 95 | ENSG00000205339 | HGNC: 9852 | 10527 |
| SEQ ID NO: 96 | ENSG00000137265 | HGNC: 6119 | 3662 |
| SEQ ID NO: 97 | ENSG00000143772 | HGNC: 6179 | 3707 |
| SEQ ID NO: 98 | ENSG00000162434 | HGNC: 6190 | 3716 |
| SEQ ID NO: 99 | ENSG00000126012 | HGNC: 11114 | 8242 |
| SEQ ID NO: 100 | ENSG00000147050 | HGNC: 12637 | 7403 |
| SEQ ID NO: 101 | ENSG00000079999 | HGNC: 23177 | 9817 |
| SEQ ID NO: 102 | ENSG00000197993 | HGNC: 6308 | 3792 |
| SEQ ID NO: 103 | ENSG00000157404 | HGNC: 6342 | 3815 |
| SEQ ID NO: 104 | ENSG00000145332 | HGNC: 18644 | 57563 |
| SEQ ID NO: 105 | ENSG00000118058 | HGNC: 7132 | 4297 |
| SEQ ID NO: 106 | ENSG00000272333 | HGNC: 15840 | 9757 |
| SEQ ID NO: 107 | ENSG00000055609 | HGNC: 13726 | 58508 |
| SEQ ID NO: 108 | ENSG00000167548 | HGNC: 7133 | 8085 |
| SEQ ID NO: 109 | ENSG00000133703 | HGNC: 6407 | 3845 |
| SEQ ID NO: 110 | ENSG00000188501 | HGNC: 15583 | 197021 |
| SEQ ID NO: 111 | ENSG00000169032 | HGNC: 6840 | 5604 |
| SEQ ID NO: 112 | ENSG00000065559 | HGNC: 6844 | 6416 |
| SEQ ID NO: 113 | ENSG00000095015 | HGNC: 6848 | 4214 |
| SEQ ID NO: 114 | ENSG00000011566 | HGNC: 6865 | 8491 |
| SEQ ID NO: 115 | ENSG00000184634 | HGNC: 11957 | 9968 |
| SEQ ID NO: 116 | ENSG00000112282 | HGNC: 2372 | 9439 |
| SEQ ID NO: 117 | ENSG00000105976 | HGNC: 7029 | 4233 |
| SEQ ID NO: 118 | ENSG00000174197 | HGNC: 14010 | 23269 |
| SEQ ID NO: 119 | ENSG00000133808 | HGNC: 25933 | 84953 |
| SEQ ID NO: 120 | ENSG00000133131 | HGNC: 23485 | 79710 |
| SEQ ID NO: 121 | ENSG00000005381 | HGNC: 7218 | 4353 |
| SEQ ID NO: 122 | ENSG00000198793 | HGNC: 3942 | 2475 |
| SEQ ID NO: 123 | ENSG00000169876 | HGNC: 16800 | 140453 |
| SEQ ID NO: 124 | ENSG00000101825 | HGNC: 7539 | 25878 |
| SEQ ID NO: 125 | ENSG00000118513 | HGNC: 7545 | 4602 |
| SEQ ID NO: 126 | ENSG00000134323 | HGNC: 7559 | 4613 |
| SEQ ID NO: 127 | ENSG00000172936 | HGNC: 7562 | 4615 |
| SEQ ID NO: 128 | ENSG00000141052 | HGNC: 16067 | 93649 |
| SEQ ID NO: 129 | ENSG00000141027 | HGNC: 7672 | 9611 |
| SEQ ID NO: 130 | ENSG00000196712 | HGNC: 7765 | 4763 |
| SEQ ID NO: 131 | ENSG00000116044 | HGNC: 7782 | 4780 |
| SEQ ID NO: 132 | ENSG00000148400 | HGNC: 7881 | 4851 |
| SEQ ID NO: 133 | ENSG00000181163 | HGNC: 7910 | 4869 |
| SEQ ID NO: 134 | ENSG00000213281 | HGNC: 7989 | 4893 |
| SEQ ID NO: 135 | ENSG00000165671 | HGNC: 14234 | 64324 |
| SEQ ID NO: 136 | ENSG00000074527 | HGNC: 13658 | 59277 |
| SEQ ID NO: 137 | ENSG00000143552 | HGNC: 29915 | 91181 |
| SEQ ID NO: 138 | ENSG00000181961 | HGNC: 15153 | 81327 |
| SEQ ID NO: 139 | ENSG00000181001 | HGNC: 14853 | 79473 |
| SEQ ID NO: 140 | ENSG00000169918 | HGNC: 20718 | 161725 |
| SEQ ID NO: 141 | ENSG00000121274 | HGNC: 30758 | 64282 |
| SEQ ID NO: 142 | ENSG00000163939 | HGNC: 30064 | 55193 |
| SEQ ID NO: 143 | ENSG00000169564 | HGNC: 8647 | 5093 |
| SEQ ID NO: 144 | ENSG00000164494 | HGNC: 23041 | 57107 |
| SEQ ID NO: 145 | ENSG00000156531 | HGNC: 18145 | 84295 |
| SEQ ID NO: 146 | ENSG00000121879 | HGNC: 8975 | 5290 |
| SEQ ID NO: 147 | ENSG00000145675 | HGNC: 8979 | 5295 |
| SEQ ID NO: 148 | ENSG00000177084 | HGNC: 9177 | 5426 |
| SEQ ID NO: 149 | ENSG00000110777 | HGNC: 9211 | 5450 |
| SEQ ID NO: 150 | ENSG00000028277 | HGNC: 9213 | 5452 |
| SEQ ID NO: 151 | ENSG00000170836 | HGNC: 9277 | 8493 |
| SEQ ID NO: 152 | ENSG00000105568 | HGNC: 9302 | 5518 |
| SEQ ID NO: 153 | ENSG00000119414 | HGNC: 9323 | 5537 |
| SEQ ID NO: 154 | ENSG00000057657 | HGNC: 9346 | 639 |
| SEQ ID NO: 155 | ENSG00000171862 | HGNC: 9588 | 5728 |
| SEQ ID NO: 156 | ENSG00000179295 | HGNC: 9644 | 5781 |
| SEQ ID NO: 157 | ENSG00000112531 | HGNC: 21100 | 9444 |
| SEQ ID NO: 158 | ENSG00000172476 | HGNC: 18283 | 142684 |
| SEQ ID NO: 159 | ENSG00000136238 | HGNC: 9801 | 5879 |
| SEQ ID NO: 160 | ENSG00000164754 | HGNC: 9811 | 5885 |
| SEQ ID NO: 161 | ENSG00000145715 | HGNC: 9871 | 5921 |
| SEQ ID NO: 162 | ENSG00000139687 | HGNC: 9884 | 5925 |
| SEQ ID NO: 163 | ENSG00000182872 | HGNC: 9896 | 8241 |
| SEQ ID NO: 164 | ENSG00000106615 | HGNC: 10011 | 6009 |
| SEQ ID NO: 165 | ENSG00000067560 | HGNC: 667 | 387 |
| SEQ ID NO: 166 | ENSG00000143622 | HGNC: 10023 | 6016 |
| SEQ ID NO: 167 | ENSG00000122406 | HGNC: 10360 | 6125 |
| SEQ ID NO: 168 | ENSG00000115268 | HGNC: 10388 | 6209 |
| SEQ ID NO: 169 | ENSG00000140988 | HGNC: 10404 | 6187 |
| SEQ ID NO: 170 | ENSG00000187257 | HGNC: 24765 | 222194 |
| SEQ ID NO: 171 | ENSG00000159216 | HGNC: 10471 | 861 |
| SEQ ID NO: 172 | ENSG00000186350 | HGNC: 10477 | 6256 |
| SEQ ID NO: 173 | ENSG00000151835 | HGNC: 10519 | 26278 |
| SEQ ID NO: 174 | ENSG00000174175 | HGNC: 10721 | 6403 |
| SEQ ID NO: 175 | ENSG00000197641 | HGNC: 8944 | 5275 |
| SEQ ID NO: 176 | ENSG00000181555 | HGNC: 18420 | 29072 |
| SEQ ID NO: 177 | ENSG00000143379 | HGNC: 10761 | 9869 |
| SEQ ID NO: 178 | ENSG00000115524 | HGNC: 10768 | 23451 |
| SEQ ID NO: 179 | ENSG00000118515 | HGNC: 10810 | 6446 |
| SEQ ID NO: 180 | ENSG00000089163 | HGNC: 14932 | 23409 |
| SEQ ID NO: 181 | ENSG00000079215 | HGNC: 10941 | 6507 |
| SEQ ID NO: 182 | ENSG00000091138 | HGNC: 3018 | 1811 |
| SEQ ID NO: 183 | ENSG00000143036 | HGNC: 28689 | 126969 |
| SEQ ID NO: 184 | ENSG00000188687 | HGNC: 18168 | 57835 |
| SEQ ID NO: 185 | ENSG00000175387 | HGNC: 6768 | 4087 |
| SEQ ID NO: 186 | ENSG00000141646 | HGNC: 6770 | 4089 |
| SEQ ID NO: 187 | ENSG00000127616 | HGNC: 11100 | 6597 |
| SEQ ID NO: 188 | ENSG00000099956 | HGNC: 11103 | 6598 |
| SEQ ID NO: 189 | ENSG00000072501 | HGNC: 11111 | 8243 |
| SEQ ID NO: 190 | ENSG00000108055 | HGNC: 2468 | 9126 |
| SEQ ID NO: 191 | ENSG00000109762 | HGNC: 21883 | 83891 |
| SEQ ID NO: 192 | ENSG00000115904 | HGNC: 11187 | 6654 |
| SEQ ID NO: 193 | ENSG00000164736 | HGNC: 18122 | 64321 |
| SEQ ID NO: 194 | ENSG00000065526 | HGNC: 17575 | 23013 |
| SEQ ID NO: 195 | ENSG00000121067 | HGNC: 11254 | 8405 |
| SEQ ID NO: 196 | ENSG00000161547 | HGNC: 10783 | 6427 |
| SEQ ID NO: 197 | ENSG00000101972 | HGNC: 11355 | 10735 |
| SEQ ID NO: 198 | ENSG00000118046 | HGNC: 11389 | 6794 |
| SEQ ID NO: 199 | ENSG00000204344 | HGNC: 11398 | 8859 |
| SEQ ID NO: 200 | ENSG00000111450 | HGNC: 3403 | 2054 |
| SEQ ID NO: 201 | ENSG00000168394 | HGNC: 43 | 6890 |
| SEQ ID NO: 202 | ENSG00000108239 | HGNC: 29082 | 23232 |
| SEQ ID NO: 203 | ENSG00000177565 | HGNC: 29529 | 79718 |
| SEQ ID NO: 204 | ENSG00000135111 | HGNC: 11602 | 6926 |
| SEQ ID NO: 205 | ENSG00000154582 | HGNC: 11617 | 6921 |
| SEQ ID NO: 206 | ENSG00000148737 | HGNC: 11641 | 6934 |
| SEQ ID NO: 207 | ENSG00000166046 | HGNC: 28627 | 255394 |
| SEQ ID NO: 208 | ENSG00000163239 | HGNC: 25316 | 126668 |
| SEQ ID NO: 209 | ENSG00000168769 | HGNC: 25941 | 54790 |
| SEQ ID NO: 210 | ENSG00000163513 | HGNC: 11773 | 7048 |
| SEQ ID NO: 211 | ENSG00000232810 | HGNC: 11892 | 7124 |
| SEQ ID NO: 212 | ENSG00000157873 | HGNC: 11912 | 8764 |
| SEQ ID NO: 213 | ENSG00000141510 | HGNC: 11998 | 7157 |
| SEQ ID NO: 214 | ENSG00000067369 | HGNC: 11999 | 7158 |
| SEQ ID NO: 215 | ENSG00000088325 | HGNC: 1249 | 22974 |
| SEQ ID NO: 216 | ENSG00000131323 | HGNC: 12033 | 7187 |
| SEQ ID NO: 217 | ENSG00000113595 | HGNC: 660 | 373 |
| SEQ ID NO: 218 | ENSG00000165699 | HGNC: 12362 | 7248 |
| SEQ ID NO: 219 | ENSG00000131044 | HGNC: 16118 | 164395 |
| SEQ ID NO: 220 | ENSG00000204193 | HGNC: 31454 | 255220 |
| SEQ ID NO: 221 | ENSG00000160201 | HGNC: 12453 | 7307 |
| SEQ ID NO: 222 | ENSG00000134086 | HGNC: 12687 | 7428 |
| SEQ ID NO: 223 | ENSG00000132970 | HGNC: 12734 | 10810 |
| SEQ ID NO: 224 | ENSG00000184937 | HGNC: 12796 | 7490 |
| SEQ ID NO: 225 | ENSG00000163092 | HGNC: 14303 | 129446 |
| SEQ ID NO: 226 | ENSG00000082898 | HGNC: 12825 | 7514 |
| SEQ ID NO: 227 | ENSG00000140836 | HGNC: 777 | 463 |
| SEQ ID NO: 228 | ENSG00000196263 | HGNC: 23226 | 57573 |
| SEQ ID NO: 229 | ENSG00000177842 | HGNC: 28742 | 253639 |
| SEQ ID NO: 230 | ENSG00000141579 | HGNC: 25843 | 79755 |
| SEQ ID NO: 231 | ENSG00000121988 | HGNC: 25249 | 84083 |

[0083] A mutation or substitution of a nucleotide in a biological sequence is denoted “non-synonymous” or “non-silent” when the mutation or substitution results in a change of an amino acid in, or disruption of, the corresponding protein sequence which may be formed by the expression of a mutated gene. Correspondingly, when the mutation or substitution does not result in a change of an amino acid in the corresponding protein sequence, the mutation or substitution is denoted “synonymous”. In one embodiment of the present invention, both synonymous and non-synonymous mutations are used in the derivation of mutation status in a gene. In such embodiments a gene is indicated as mutated if one or more synonymous or non-synonymous mutations are determined in the gene compared to the gene of a normal sample.

[0084] Non-synonymous mutations may lead to functional or structural changes in the corresponding protein which in turn may alter the function of a cell such as seen in relation to cancer. Synonymous mutations may not give rise to any changes of properties of a corresponding protein. In a more preferred embodiment of the present invention, only non-synonymous mutations are used in the derivation of mutation status in a gene. In such embodiments a gene is only indicated as mutated if one or more non-synonymous mutations are determined in the exons of a gene compared to the gene of a normal sample.

[0085] In a more preferred embodiment, only non-synonymous mutations in exons of the genes, such as in the coding DNA sequences of SEQ ID NO:1 to 231 of Table 1 are used in the derivation of mutation status for use in the prediction method of the present invention.

### Information On Single Base Substitution for Use in the Method of the Invention

[0086] Single base substitutions are often associated with cancer. DNA comprises the nucleotide bases cytosine (C), guanine (G), thymine (T) and adenine (A). There are thus 12 possible different single base substitution classes when the identities of the flanking bases are not taken into account or used for classification. These 12 different classes may be selected from the group consisting of C to G, C to A, C to T, T to A, T to C, T to G, G to A, G to C, G to T, A to C, A to G and A to T.

[0087] Each type of the different single base substitution classes may be associated with different types of cancer. In one embodiment of the present invention, the calculation of information types i) of step c) performed by using the frequency of observations of one or more of the 12 base substitution classes as defined above in the biological sequence of a bodily sample. In a specific embodiment of the present invention, the calculation of information types i) of step c) involves the calculation of the relative contribution of one or more of 12 base substitution classes as defined above in biological sequences of a bodily sample.

[0088] Single base substitutions in a biological sequence can be determined by using DNA or RNA sequencing methods, wherein DNA sequencing is more preferred.

[0089] For a given tumour sample, the single base substitution frequency for a given class of base substitution can be calculated by counting the number of genomic locations in which that class of base substitution is identified. In another embodiment, this resulting number is divided by the total number of identified single base substitutions of any class.

[0090] Since DNA is commonly found as a base-paired double strand of nucleotides, a substitution in one strand is usually found in combination with a substitution in the corresponding complementary strand. Therefore, in some embodiments of the present invention, information of single base substitution frequency may be calculated by counting only the pyrimidine of the germline Watson-Crick base pair, and thus reducing the number of classes to six different classes of single base substitutions selected from the group consisting of C to A, C to G, C to T, T to A, T to C and T to G. In one embodiment of the present invention, the calculation of information types i) of step c) involves the calculation of the relative contribution of one or more of the 6 base substitution classes as defined above using the pyrimidine of the germline Watson-Crick base pair.

[0091] Single base substitution frequency may alternatively be calculated by using only the purine of the germline Watson-Crick base pair. Therefore, in some embodiments of the present invention, information of single base substitution frequency may be calculated by using only the purine of the germline Watson-Crick base pair, and thus reducing the number of classes to six different classes of single base substitutions selected from the group consisting of A to C, A to T, A to G, G to T, G to C and G to A. In one embodiment of the present invention, the calculation of information types i) of step c) involves the calculation of the relative contribution of one or more of the 6 base substitution classes as defined above using the purine of the germline Watson-Crick base pair, such as for example all 6 base substitution classes.

[0092] Single base substitution frequency in specific triplets of nucleotide bases, wherein the identity of the two bases flanking the substituted base is taken into account has further been associated with cancer. When the identity of the two flanking bases is taken into account, there are 192 different classes of single base substitutions which are possible.

[0093] In another embodiment of the present invention, the single base substitution frequency in specific triplets of nucleotide bases (information type ii) of step c) is calculated by using only the purine of the germline Watson-Crick base pair for the middle single base substitution, and thus reducing the number of classes to 96 different classes of single base substitutions. Following this scheme, the middle substituted base can vary between the 6 types of substitutions selected from the group consisting of A to C, A to T, A to G, G to T, G to C and G to A, and the identity of each of the two flanking bases may be selected from A, C, G or T.

[0094] In another embodiment of the present invention, the single base substitution frequency in specific triplets of nucleotide bases (information type ii) of step c) is calculated by using only the pyrimidine of the germline Watson-Crick base pair for the middle single base substitution, and thus reducing the number of classes to 96 different classes of single base substitutions. Following this scheme, the middle substituted base in DNA can vary between the 6 types of substitutions selected from the group consisting of C to A, C to G, C to T, T to A, T to C and T to G and the identity of each of the two flanking bases may be selected from A, C, G or T. Thus in one embodiment of the present invention, the single base substitution frequency in specific triplets of nucleotide bases (information types i) of step c) is calculated by using only the pyrimidine of the germline Watson-Crick base pair for the single base substitution, and using one or more of the resulting 96 different classes of single base substitutions selected from the group consisting of the triplets of nucleotides of Table 2 below.

TABLE 2
96 different trinucleotide classes obtained by
using only the pyrimidine of the germline
Watson-Crick base pair for the middle single
base substitution.

| | | | |
|---|---|---|---|
| ACA to AAA | CCC to CAC | GCG to GAG | TCT to TAT |
| CCA to CAA | GCC to GAC | TCG to TAG | ATT to AAT |
| GCA to GAA | TCC to TAC | ATG to AAG | CTT to CAT |
| TCA to TAA | ATC to AAC | CTG to CAG | GTT to GAT |
| ATA to AAA | CTC to CAC | GTG to GAG | TTT to TAT |
| CTA to CAA | GTC to GAC | TTG to TAG | ATT to ACT |
| GTA to GAA | TTC to TAC | ATG to ACG | CTT to CCT |
| TTA to TAA | ATC to ACC | CTG to CCG | GTT to GCT |
| ATA to ACA | CTC to CCC | GTG to GCG | TTT to TCT |
| CTA to CCA | GTC to GCC | TTG to TCG | ACT to AGT |
| GTA to GCA | TTC to TCC | ACG to AGG | CCT to CGT |
| TTA to TCA | ACC to AGC | CCG to CGG | GCT to GGT |
| ACA to AGA | CCC to CGC | GCG to GGG | TCT to TGT |
| CCA to CGA | GCC to GGC | TCG to TGG | ATT to AGT |
| GCA to GGA | TCC to TGC | ATG to AGG | CTT to CGT |
| TCA to TGA | ATC to AGC | CTG to CGG | GTT to GGT |
| ATA to AGA | CTC to CGC | GTG to GGG | TTT to TGT |
| CTA to CGA | GTC to GGC | TTG to TGG | ACT to ATT |
| GTA to GGA | TTC to TGC | ACG to ATG | CCT to CTT |
| TTA to TGA | ACC to ATC | CCG to CTG | GCT to GTT |
| ACA to ATA | CCC to CTC | GCG to GTG | TCT to TTT |
| CCA to CTA | GCC to GTC | TCG to TTG | |
| GCA to GTA | TCC to TTC | ACT to AAT | |
| TCA to TTA | ACG to AAG | CCT to CAT | |
| ACC to AAC | CCG to CAG | GCT to GAT | |

[0095] In one embodiment of the present invention, the calculation of information type ii) of step c) involves the calculation of the relative contribution of one or more of the 96 base substitution classes as defined above using either the pyrimidine or the purine of the germline Watson-Crick base pair, such as for example the relative contribution of each of the 96 base substitution classes as defined for either DNA or RNA above using either the pyrimidine or the purine of the germline Watson-Crick base pair,

[0096] Single base substitution may occur in wide variety of genomic regions, and may therefore be found in a range of various DNA sequences. In one embodiment of the present invention, the single base substitution frequency (information types i) and/or ii) of step c) is calculated by taking into account all single base substitutions in the genome of a tumour. In another embodiment, the single base substitution frequency (information types i) and/or ii) of step c) is calculated by taking into account all single base substitutions in the genome of a tumour that can be detected using the available data.

[0097] In other embodiments of the present invention, the single base substitution frequency (information types i) and/or ii) of step c) is calculated by using all single base substitutions in specific encoding regions, genes and/or exons in the genome of a tumour.

### Information On Copy Number Variation for Use in the Method of the Invention

[0098] Genomic regions may be structurally altered in cancer, thus resulting in genomic regions that differ in copy number from the copy number of the same genomic region in a healthy cell or a non-cancerous cell. In the case of most genes, the copy number of a healthy cell or a non-cancerous cell is normally 2, since the gene is present on two chromosomes. For such genes, the presence of more than 2 or less than 2 copies of the gene is a sign of copy number variation, which may be caused by cancer, In one embodiment of the present invention, the copy number of genomic regions and/or genes in biological sequences of said bodily sample is compared to the copy number of the corresponding genomic regions and/or genes in a normal sample of healthy or non-cancerous material and used for calculating the classification score.

[0099] The CNV status of a genomic region, gene (information type iii) can be determined by hybridization-based methods, including SNP array, CGH array, spectral karyotyping, FISH or by sequencing based methods in which the relative sequencing depth is analyzed, for example as described by Favero et al 2014, or by gene expression profiling, and other methods commonly used in the art for determination of copy number.

[0100] Information of the CNV status of a genomic region, gene or exome (information type iii) of step c) can be encoded in different ways to correlate with the copy number variation of a given genomic region, gene or set of genes in a sample and used for calculation of the classification score in a method according to the invention. For example, the CNV status (information type iii) of step c) may be encoded as altered (1) or non-altered (0) compared to a normal sample including the same genomic region, gene or set of genes in healthy tissue or non-cancerous tissue and used in the present method, alternatively the CNV information can be encoded as −1, 0 or +1, corresponding to a copy number of <2, 2 or >2 if the chromosome is an autosome, or <1, 1, or >1 if the chromosome is a sex chromosome, or the CNV information can be encoded as consisting of the specific copy number of a genomic region, gene or set of genes, or the CNV information can be encoded as the consisting of difference in the copy number of a genomic region, gene or set of genes compared to the same genomic region, gene or set of genes in healthy tissue or non-cancerous tissue.

[0101] The copy number variation of different specific genes may be associated with different cancer types. In one embodiment of the present invention, the calculation of copy number variation (information type iii) of step c) is based on the copy number variation of genes which are mutated in cancer, such as determined by using a method which involves identifying genes that are mutated more frequently than expected from the background mutation rate in any individual cancer type, as identified through genomic analysis of several individual tumours as described by Lawrence et al 2013. In one embodiment of the present invention, the copy number variation is derived in genes that are mutated in cancer, wherein the selected genes are mutated more frequently than expected from the background mutation rate in any individual cancer type, as identified through genomic analysis of several individual tumours.

[0102] In a more preferred embodiment of the present invention, the method calculates a classification score using copy number variation (information type iii) of step c) in a set of genes encoding or corresponding to the sequences of SEQ ID NO: 1 to 231.

### Classifiers for Use in the Methods of the Invention

[0103] One advantage of using classifiers based on machine-learning methods is that such methods can be used and trained to take into account complex relations in the input data, such as for example statistical interactions between mutations in different genes, which are not easily described by simple rules. This can potentially result in better predictive performance.

[0104] In an embodiment of the current invention, the method is computer-implemented and involves the use of at least one classifier, or a plurality of classifiers that is based on a machine learning method.

[0105] Examples of machine learning methods that may be used for the method according to the present invention can include the following: artificial neural network, backpropagation, boosting, bayesian statistics, decision tree learning, Gaussian process regression, kernel estimators, naive Bayes classifier, nearest neighbor algorithm, restricted Boltzmann machine, stepwise additive logistic regression, support vector machines, random forests, ensembles of classifiers,.

[0106] In a more preferred embodiment, the method according to the present invention is computer-implemented and involves the use of at least one classifier or a plurality of classifiers each being based on a machine learning method selected from the group consisting of decision trees, random forests, stepwise additive logistic regression, artificial neural networks and support vector machines.

[0107] In an even more preferred embodiment of the present invention, the method according to the present invention is computer-implemented and involves the use a random forest classifier.

### Calculation of Classification Score and Ranking of the Cancer Types

[0108] The method according to the present invention produces a ranking of a plurality of cancer types based on the classification score calculated by use of mutation status of step b) in combination with one or more of information types i) to iii) of step c) of the method.

[0109] In one embodiment of the present invention, said classification score for each of a plurality of cancer types in a subject is calculated as the proportion of classifiers that predict a given type of cancer.

[0110] In a more preferred embodiment of the present invention, the method involves the use of a random forest classifying method and the classification score for a given type of cancer is calculated as the proportion of trees that predict the given type of cancer.

[0111] According to the method of the present invention, the plurality of cancer types is ranked based on their likelihood of being present in a sample. Such a ranking may preferably be performed by listing the cancer types based on classification score and by descending classification score. When such a ranked list is used for predicting a specific type of cancer in a subject, the highest ranking cancer types, most preferably the top ranking cancer type, the top two ranking cancer types or the top three ranking cancer types may be used for predicting the cancer type in a subject, and selecting further clinical test to be performed on said subject.

### Confidence Scores for Use in the Method of the Invention

[0112] In some cases, the differences in classification score calculated for two cancer types among the plurality of cancer types may be minor. In such cases, the confidence of a prediction of a given type of cancer based on the ranking of classification scores may be reduced, and the identity of the cancer type ranking number two (i.e. the cancer type with second highest classification score) may be useful for clinical testing as well, since there is an increased chance that the primary tumour may originate from that cancer tissue type.

[0113] In one embodiment of the present invention, the method further comprises a step wherein a confidence score is calculated as the difference between the classification scores from the two highest ranking types of cancer. The authors have found that such a confidence score helps to point to specific subjects, wherein the top two or three ranking cancer types should be taken into account and used in the prediction of cancer type in a subject.

### Cancer Types Predicted By the Method of the Invention

[0114] Cancer (malignant neoplasm) is a class of diseases in which a group of cells display the traits of uncontrolled growth (growth and division beyond the normal limits), invasion (intrusion on and destruction of adjacent tissues), and sometimes metastasis (spread to other locations in the body via lymph or blood). These three malignant properties of cancers differentiate them from benign tumours, which are self-limited, do not invade or metastasize. Most cancers form a tumour but some, like leukemia, do not.

[0115] Cancers are classified by the type of cell that resembles the tumour and, therefore, the tissue presumed to be the origin of the tumour. The following general categories are applied:

[0116] Carcinoma: malignant tumours derived from epithelial cells. This group includes the most common cancers, comprising the common forms of breast, prostate, lung and colon cancer.

[0117] Lymphoma and Leukemia: malignant tumours derived from blood and bone marrow cells.

[0118] Sarcoma: malignant u ours derived from connective tissue, or mesenchymal cells

[0119] Mesothelioma: tumours derived from the mesothelial cells lining the peritoneum and the pleura.

[0120] Glioma: tumours derived from glia, the most common type of brain cell. Germinoma: tumours derived from germ cells, normally found in the testicle and ovary.

[0121] Choriocarcinoma: malignant tumours derived from the placenta.

[0122] The method of the present invention is useful for prediction of a cancer type among a plurality of different cancer types, such as for example one or more cancers selected from the group consisting of carcinoma, lymphoma, leukemia, sarcoma, mesothelioma, glioma, germinoma and choriocarcinoma.

[0123] In one embodiment, the cancer is a non-CNS (Central Nervous System) cancer.

[0124] Examples of cancers for which the method according to the present invention can calculate classification scores include: colon carcinoma, breast cancer, pancreatic cancer, ovarian cancer, prostate cancer, fibrosarcoma, myxosarcoma, liposarcoma, chondrosarcoma, osteogenic sarcoma, chordoma, angiosarcoma, endotheliosarcoma, lymphangeosarcoma, lymphangeoendothelia sarcoma, synovioma, mesothelioma, Ewing's sarcoma, leiomyosarcoma, rhabdomyosarcoma, squamous cell carcinoma, basal cell carcinoma, adenocarcinoma, sweat gland carcinoma, sebaceous gland carcinoma, papillary carcinoma, papillary adenocarcinomas, cystandeocarcinoma, medullary carcinoma, bronchogenic carcinoma, renal cell carcinoma, hepatoma, bile duct carcinoma, choriocarcinoma, seminoma, embryonal carcinoma, Wilms' tumour, cervical cancer, testicular tumour, lung carcinoma, small cell lung carcinoma, bladder carcinoma, epithelial carcinoma, glioblastomas, neuronomas, craniopharingiomas, schwannomas, glioma, astrocytoma, medulloblastoma, craniopharyngioma, ependymoma, pinealoma, hemangioblastoma, acoustic neuroama, oligodendroglioma, meningioma, melanoma, neuroblastoma, retinoblastoma, leukemias and lymphomas, acute lymphocytic leukemia and acute myelocytic polycythemia vera, multiple myeloma, Waldenstrom's macroglobulinemia, and heavy chain disease, acute nonlymphocytic leukemias, chronic lymphocytic leukemia, chronic myelogenous leukemia, Hodgkin's Disease, non-Hodgkin's lymphomas, rectum cancer, urinary cancers, uterine cancers, oral cancers, skin cancers, stomach cancer, brain tumours, liver cancer, laryngeal cancer, esophageal cancer, mammary tumours, childhood-null acute lymphoid leukemia (ALL), thymic ALL, B-cell ALL, acute myeloid leukemia, myelomonocytoid leukemia, acute megakaryocytoid leukemia, Burkitt's lymphoma, acute myeloid leukemia, chronic myeloid leukemia, and T cell leukemia, small and large non-small cell lung carcinoma, acute granulocytic leukemia, germ cell tumours, endometrial cancer, gastric cancer, cancer of the head and neck, chronic lymphoid leukemia, hairy cell leukemia and thyroid cancer

[0125] In one preferred embodiment of the present invention, the plurality of cancer types for which the method of the present invention calculates classification scores comprises at least the following types of cancer: breast, endometrium, kidney, large intestine, liver, lung, ovary, pancreas, prostate, and skin cancer. In a more preferred embodiment, the plurality of cancer types for which the method of the present invention calculates classification scores consists of the following types of cancer: breast, endometrium, kidney, large intestine, liver, lung, ovary, pancreas, prostate, and skin cancer.

[0126] In another preferred embodiment of the present invention, the plurality of cancer types for which the method of the present invention calculates classification scores comprises at least the following types of cancer: breast, endometrium, kidney, large intestine, lung and ovary cancer. In an even more preferred embodiment, the plurality of cancer types for which the method of the present invention calculates classification scores consists of the following types of cancer: breast, endometrium, kidney, large intestine, lung and ovary cancer.

[0127] A bodily sample according to the present invention can be any type of bodily sample which may include cancer material such as cancer cells, DNA, RNA or protein. In one preferred embodiment of the present invention, the bodily sample comprises tumour cells or tumour DNA.

[0128] Examples of acquired bodily samples which may be used in the method according to the present invention include bodily tissue samples and/or bodily fluid samples. The type of bodily sample used and method for acquiring such bodily samples may be varied based on the type of cancer.

[0129] Tumours located in a variety of organs may shed cells or mutated DNA into bodily fluids such as e.g. the bloodstream which gives rise to circulating tumour DNA (ctDNA) or circulating tumour cells. This phenomenon allows for the use of bodily fluid samples which are acquired by use of minimally invasive or non-invasive methods for predicting cancer in methods as disclosed herein. The use of such bodily fluid samples has many advantages, one is that the subject is spared the pain of obtaining a bodily sample by use of an invasive method. Another is that such bodily fluids may be obtained more frequently, and this allows for the use of the method according to the present invention for screening of a larger population of subjects for the presence of cancer.

[0130] Samples of bodily fluids which may comprise cancer cells or cancer DNA according to the present invention may include amniotic fluid, aqueous humour and vitreous humour, bile, blood, serum, plasma, breast milk, cerebrospinal fluid, cerumen (earwax), chyle, chime, endolymph and perilymph fluid, exudates, feces, female ejaculate, gastric acid, gastric juice, lymph, mucus (including nasal drainage and phlegm), pericardial fluid, peritoneal fluid, pleural fluid, pus, rheum, saliva, sebum (skin oil), semen, sputum, synovial fluid, sweat, tears, urine, vaginal secretion and vomit.

[0131] Tumours located in variety of organs may shed cells or mutated DNA into bodily fluids such as e.g. the bloodstream. In a preferred embodiment of the present invention, the bodily sample is a sample of bodily fluid comprising circulating tumour cells or circulating tumour DNA (ctDNA), such as blood, serum, plasma, urine, lymph fluid, sputum or bronchial washing fluid.

[0132] Bodily tissue samples may be acquired by performing biopsy, surgery, scraping or other commonly known methods for acquiring bodily tissue samples. In a preferred embodiment of the present invention, the bodily sample is acquired by performing biopsy or surgery.

[0133] In cases wherein a subject presents with metastatic cancer and wherein the primary cancer tissue type is not known, the method of the present invention can be used to predict the primary cancer tissue based on an acquired sample comprising metastatic cancer material. Thus in a preferred embodiment of the present invention, the acquired bodily sample comprises metastatic cancer material, such as for example a biopsy of a metastasis or a sample of bodily fluid comprising metastatic cancer material.

[0134] A representative way of performing diagnoses of the origin of a tumour is illustrated in the flow chart of FIG. 8. When a new patient with a tumour is seen in the clinic, the most likely outcome it that the tumour is a primary tumour and thus that the origin is evident. In approximately 10% of all cases, the tumour causing symptoms and thus detected first is a metastasis from a tumour in another tissue. In about half of the cases of metastatic cancer, the primary tumour is readily located, while in the other half of cases, the primary tumour is not readily located. These are known as metastases of unknown origin (MUO). Additional diagnostic tests are employed to detect the origin of the MUO but in about 2-4% of all cases, the primary origin is not located. These are known as cancers of unknown primary (CUP) and are the most difficult cases to treat. By using the methods disclosed herein the percentage of MUO and CUP can be reduced. Additionally, the number of diagnostic procedures can be reduced or focused on the most likely origin.

[0135] The method according to the present invention may be computer implemented and performed by use of different entities. For example, one or more steps of the method may be performed on a client, which may then send information derived from or calculated in the various steps of the method to a server. Thus, in one embodiment of the method of the invention at least one of steps a) to c) is performed by a client, wherein said client is capable of sending to a server one or more types of data according to claim 1 selected from the group consisting of genomic profile, mutation status, information type I), information type ii) information type iii), classification score and ranking.

[0136] In another embodiment of the of the method of the invention at least one of steps b) to e) is performed by a server, wherein said server is capable of receiving from a client one or more types of data according to claim 1 selected from the group consisting of genomic profile, mutation status, information type i), information type ii) information type iii), classification score and ranking.

### Products for Performing the Method of the Invention

[0137] Another aspect of the present invention is to provide a computer program product having instructions which when executed by a computing device or system causes the computing device or system to carry out the method according to the invention as described herein.

[0138] Still another aspect of the invention is to provide a data-processing system having means for carrying out the method according to the invention as described herein.

[0139] Still another aspect of the invention is to provide a computer readable medium having stored there on a computer program product having instructions which when executed by a computing device or system causes the computing device or system to carry out the method according to the invention as described herein.

### Items

[0140] The following set of items further describes the invention:

[0141] Item:
[0142] 1. A method for prediction of a specific type of cancer in a subject using an acquired bodily sample from said subject, said method comprising the steps of:
   [0143] a) providing biological sequences derived from said bodily sample,
   [0144] b) deriving the mutation status of specific genes that are mutated in cancer from said biological sequences compared to a normal sample,
   [0145] c) calculating one or more of the following types of information i) to iii) from said biological sequences:
      [0146] i) single base substitution frequency wherein the identity of the two bases flanking said substitution is not taken into account,
      [0147] ii) single base substitution frequency in triplets of nucleotide bases, wherein the identity of the two bases flanking the substitution is taken into account,
      [0148] iii) copy number variation (CNV) of genomic regions and/or genes compared to the copy number of the same regions and/or genes in a normal sample
   [0149] d) calculating a classification score for the presence of each of a plurality of cancer types in said subject, wherein said classification score calculation is based on the mutation status derived from step b) in combination with the one or more of the information types i) to iii) being calculated in step c),
   [0150] e) ranking the plurality of cancer types based on the classification score of step d), and
   [0151] f) predicting the specific type of cancer in said subject based on the ranking of step e).
[0152] 2) The method according to item 1, wherein the method calculates said classification score based on a combination of the mutation status derived from step b) in combination with information types i) and/or ii) of step c).
[0153] 3) The method according to the preceding items, wherein the method calculates said classification score based on a combination of the mutation status derived from step b) in combination with information type ii) of step c).
[0154] 4) The method according to the preceding items, wherein the method calculates said classification score based on a combination of the mutation status derived from step b) in combination with information type iii) of step c).
[0155] 5) The method according to the preceding items, wherein the method calculates said classification score based on a combination of the mutation status derived from step b) in combination with information type iii) and one or more of the information types i) and ii) of step c),
[0156] 6) The method according to the preceding items, wherein the method calculates said classification score based on a combination of the mutation status derived from step b) in combination with information types iii) and ii) of step c),
[0157] 7) The method according to the preceding items, wherein the method calculates said classification score based on a combination of the mutation status derived from step b) in combination with information types iii) and i) of step c).
[0158] 8) The method according to the preceding items, wherein said biological sequence is a DNA, mRNA or protein sequence obtained from said bodily sample.
[0159] 9) The method according to the preceding items, wherein said biological sequence is a DNA and/or mRNA sequence obtained from said bodily sample.
[0160] 10) The method according to the preceding items, wherein both synonymous and non-synonymous mutations are used for deriving said mutation status.
[0161] 11) The method according to the preceding items, wherein only non-synonymous mutations are used for deriving said mutation status.
[0162] 12) The method according to the preceding items, wherein the mutation status of step b) is based on mutation status of genes that are recurrently mutated in association with cancer.
[0163] 13) The method according to the preceding items, wherein the mutation status of step b) is calculated in a set of genes encoding the sequences of SEQ ID NO: 1 to 231 and/or in the sequences of SEQ ID NO: 1 to 231.
[0164] 14) The method according to the preceding items, wherein the calculation of information types i) of step c) is encoded as the relative contribution for one or more of the 12 substitution classes.
[0165] 15) The method according to the preceding items, wherein the calculation of information types i) and ii) of step c) is only based on the pyrimidine of the germ-line Watson-Crick base-pair and the single base substitutions are selected from the group consisting of C to A, C to G, C to T, T to A, T to C and T to G.
[0166] 16) The method according to the preceding items, wherein the calculation of information types i) and ii) of step c) is only based on the purine of the germ-line Watson-Crick base-pair and the single base substitutions are selected from the group consisting of A to C, A to T, A to G, G to T, G to C and G to A.
[0167] 17) The method according to items 12 and 13, wherein the calculation of information types i) of step c) is encoded as the relative contribution for each of the possible 6 substitution classes
[0168] 18) The method according to the preceding items, wherein the calculation of information types ii) of step c) is calculated based on the pyrimidine of the germ-line Watson-Crick base-pair and the single base substitutions are selected from the group consisting of C to A, C to G, C to T, T to A, T to C and T to G, and wherein said single base substitution frequency in triplets for each member of this group is calculated by using the number of each specific type of single base substitution in triplets of nucleotide bases.
[0169] 19) The method according to the preceding items, wherein the calculation of information types ii) of step c) is calculated based on the purine of the germ-line Watson-Crick base-pair and the single base substitutions are selected from the group consisting of A to C, A to T, A to G, G to T, G to C and G to A, and wherein said single base substitution frequency in triplets for each member of this group is calculated by using the number of each specific type of single base substitution in triplets of nucleotide bases.
[0170] 20) The method according to items 15 to 16, wherein the calculation of information types ii) of step c) is encoded as the relative contribution for each of the possible 96 classes.
[0171] 21) The method according to the preceding items, wherein information types i) and/or ii) of step c) are calculated based on substitutions in biological sequences encoded by the genome of said subject.
[0172] 22) The method according to the preceding items, wherein information types i) and/or ii) of step c) are calculated based on substitutions in biological sequences in specific genes of said subject.
[0173] 23) The method according to the preceding items, wherein information types i) and/or ii) of step c) are calculated based on substitutions in biological sequences in specific encoding regions, genes and/or exons.
[0174] 24) The method according to the preceding items, wherein the calculation of information type iii) of step c) is encoded to correlate with the copy number variation of genomic regions, genes and/or sets of genes.
[0175] 25) The method according to the preceding items, wherein the calculation of information type iii) of step c) is encoded as −1, 0 and +1, corresponding in autosomes to a copy number of <2, 2 and >2 respectively, or in sex chromosomes to a copy number of <1, 1 and >1 respectively.
[0176] 26) The method according to the preceding items, wherein the calculation of information type iii) of step c) consists of the copy number or the difference in copy number of genomic regions, genes and/or sets of genes in said sample compared to the copy number of the same genomic regions, genes and/or sets of genes a normal sample.
[0177] 27) The method according to the preceding items, wherein the calculation of information type iii) of step c) is based on the copy number variation of genes associated with cancer.
[0178] 28) The method according to the preceding items, wherein the calculation of information types iii) of step c) is based on the copy number variation of a set of genes encoding the sequences of SEQ ID NO: 1 to 231.
[0179] 29) The method according to any of the preceding items, wherein the calculation of information types i) to iii) of step c) and/or the mutation status of step b) is based on a comparison to a normal bodily sample from the same subject.
[0180] 30) The method according to any of the preceding items, wherein said method is computer-implemented and involves the use of at least one classifier that is based on a machine learning method, preferably selected from the group consisting of decision trees, random forests, stepwise additive logistic regression, artificial neural networks and support vector machines, and more preferably wherein the machine learning method is random forests.
[0181] 31) The method of item 30 wherein said method involves the use of a plurality of classifiers which are based on a machine learning method, preferably selected from the group consisting of decision trees, random forests, stepwise additive logistic regression, artificial neural networks and support vector machines, and more preferably wherein the machine learning method is random forests.
[0182] 32) The method according to any of the preceding items, wherein said method is computer-implemented and uses a random forest classifying method.
[0183] 33) The method according to any of the preceding items, wherein the method takes into account statistical interactions between mutations.
[0184] 34) The method according to any of the preceding items, wherein the plurality of cancer types comprises at least the following types of cancer: breast, endometrium, kidney, large intestine, liver, lung, ovary, pancreas, prostate, and skin cancer.
[0185] 35) The method according to any of the preceding items, wherein the plurality of cancer types comprises at least the following types of cancer: breast, endometrium, kidney, large intestine, lung and ovary cancer.
[0186] 36) The method according to any of the preceding items, wherein the plurality of cancer types consists of the following types of cancer: breast, endometrium, kidney, large intestine, liver, lung, ovary, pancreas, prostate, and skin cancer.
[0187] 37) The method according to any of the preceding items, wherein the plurality of cancer types consists of the following types of cancer: breast, endometrium, kidney, large intestine, lung and ovary cancer.
[0188] 38) The method according to any of the preceding items, wherein said ranking is based on a sorted list of classification scores from one or more classifiers,
[0189] 39) The method according to any of the preceding items, wherein the classification score for each cancer type is calculated as the proportion of positive-voting trees in a random forests classifier trained to distinguish that cancer type from all other cancer types.
[0190] 40) The method according to any of the preceding items, further comprising a step wherein a confidence score is calculated as the difference between the classification scores from the two highest ranking types of cancer.
[0191] 41) The method according to any of the preceding items, wherein the bodily sample is a bodily tissue sample or a bodily fluid sample.
[0192] 42) The method according to any of the preceding items, wherein the bodily sample is a bodily fluid sample such as sample of blood, serum, plasma, urine, lymph fluid, sputum or bronchial washing fluid.
[0193] 43) The method according to any of the preceding items, wherein said sample comprises tumour cells or tumour DNA.
[0194] 44) The method according to any of the preceding items, wherein the bodily sample is a sample comprising circulating tumour DNA (ctDNA) or circulating tumor cells.
[0195] 45) The method according to any of items 1-42, wherein said bodily sample comprises metastatic cancer material, such as a biopsy sample of a metastasis or a sample of bodily fluid comprising metastatic cancer material.
[0196] 46) The method according to any of the preceding items, wherein at least one of steps a) to c) is performed by a client, and wherein said client is capable of sending to a server one or more types of data according to item 1 selected from the group consisting of genomic profile, mutation status, information type i), information type ii) information type iii), classification score and ranking.
[0197] 47) The method according to any of the preceding items, wherein at least one of steps b) to e) is performed by a server, and wherein said server is capable of receiving from a client one or more types of data according to item 1 selected from the group consisting of genomic profile, mutation status, information type i), information type ii) information type iii), classification score and ranking.
[0198] 48) A computer program product having instructions which when executed by a computing device or system causes the computing device or system to carry out the method according to any one of items 1 to 47.
[0199] 49) A data-processing system having means for carrying out the method according to any one of items 1 to 47.
[0200] 50) A computer readable medium having stored thereon a computer program product according to item 48.

### EXAMPLES

### Example 1

[0201] The present example describes the development and testing of prediction methods as described herein.

### Data

[0202] We used the publically available COSMIC Whole Genomes database to identify tumour specimens with genome-wide or exome-wide somatic mutation data, and focused on solid non-central nervous system (non-CNS) tumours of the ten primary cancer tissue sites for which at least 200 unique specimens were available (Table 3).

TABLE 3
Total number of samples with mutation data representing each
cancer tissue type, and the number that also has CNV data,
including those in the training set and those in the testing set

Number of samples
with data for:

| Table 3 | Point | Copy number |
|---|---|---|
| Primary site | mutations | variations |
| Breast | 936 | 850 |
| Endometrium | 281 | 246 |
| Kidney | 468 | 300 |
| Large Intestine | 592 | 486 |
| Liver | 415 | — |
| Lung | 807 | 476 |
| Ovary | 497 | 462 |
| Pancreas | 311 | — |
| Prostate | 372 | — |
| Skin | 296 | — |
| Total | 4975 | 2820 |

[0203] Somatic mutation data from the COSMIC database version 68 by Bamford et al. was downloaded at Feb. 8, 2014 (ftp://ftp.sanger.ac.uk/pub/CGP/cosmicidata_export/CosmicMutantExport_v68.tsv.gz),

[0204] The downloaded data corresponded to 235589 samples. Out of these, 227757 samples were removed, which were samples that were not labeled as “Genome:wide.screen” (227512 samples), and samples labeled as cell-line (5064 samples).

[0205] Furthermore, in ten cases, two sample IDs matched to the same tumour ID, meaning one tumour gave rise to two samples in the data set. In 105 cases, the same sample name matched to more than one tumour ID. Samples were removed to leave only one sample per tumour ID. When deciding which sample to keep, the following priorities were made: Surgery biopsy, primary, verified and exome seq had priority over xenograft, relapse, unverified and RNA-Seq, respectively.

[0206] Gene annotation in the database was not entirely consistent and thus required additional curation. We mapped as many genes as possible to Ensembl gene IDs, by searching for gene information in the following columns: Accession.Number, HGNC.ID. and Gene.name, which in most cases contained the gene symbol, but was also found to hold Ensembl gene IDs and Swissprot accession numbers. We were able to annotate Ensembl gene IDs to 99,4% of the mutations in COSMIC, Finally, mutations in COSMIC are reported for all possible trancripts, so we filtered the mutation table so that each row corresponded to a single unique mutation identified by its genomic position.

[0207] We also downloaded all available CNV data from the COSMIC database at Feb. 8, 2014 (ftp://ftp.sanger.ac.uk/pub/CGP/cosmicidata_export/CosmicCompleteCNV_v68.tsv.gz), and mapped the genes overlapping with each CNV segment.

[0208] The resulting ˜5000 specimens were split randomly, while retaining proportionality of each class, into a training set of ˜4000 specimens used to derive a classifier, and a validation set of ˜1000 that was not used except to evaluate the final classifier. We used five-fold cross validation on the training set to select the machine learning method and features as described below (FIG. 1).

### Evaluation of Classifier Performance

[0209] We trained a set of random forest classifiers to identify each of 10 primary cancer tissue sites from the chosen information input variables. Selection of features (i.e. which types of input should be used in methods for prediction of cancer) was performed using 5-fold cross-validation: the training data was split into five parts, conserving the distribution of the ten primary cancer tissue sites within each part. For each primary cancer tissue site, we trained a random forest on four parts combined, evaluated its performance on the fifth part, and repeated this for all five cross validations. Separate models were trained for each primary site, each learning to distinguish one site from the remaining primary sites.

[0210] Performance was evaluated by collecting the classification scores for each primary cancer tissue site, and predicting a primary cancer tissue site for each sample by picking the highest classification score. Accuracy was calculated as the fraction of samples across all cross-validation test sets that were correctly classified by the first proposal. After input information features were selected, they were used to train a final model, using the entire training data set. Performance of the final models was evaluated using the test set that was set aside prior to cross-validation.

### Selection of Machine Learning Method

[0211] We tested four commonly used machine learning methods: stepwise additive logistic regression, artificial neural networks, support vector machines, and random forests.

[0212] For each machine learning method, we trained a set of ten classifiers, using input information of the mutation status of 231 genes mutated in cancer in combination with calculated single base substitution frequency (without taking into account the identity of the two flanking bases and calculated using only the pyrimidine of the germ line Watson-Crick base pair). Each classifier was trained to discriminate one primary cancer tissue site from the other nine, using the input of 236 features.

[0213] Random forest classifiers based on Breiman (2001) were trained using the randomForest by Liaw and Wiener (2002) package v.4.6-7 in R, using the default parameters to grow 500 trees, and sample \sqrt{p} features as candidates at each split within a tree, where p is the total number of features. Stratified sampling was used to draw equal numbers of cases and non-cases for each tree, with sample size equal to 0.632 times the size of the smallest group. When applied to a new data sample, we define the “classification score” as the proportion of the trees that voted for the given primary site.

[0214] Based on cross-validation accuracy, we found that the method (using input information of the mutation status of 231 genes mutated in cancer in combination with calculated single base substitution frequency (without taking into account the identity of the two flanking bases and calculated using only the pyrimidine of the germ line Watson-Crick base pair)) worked successfully with all the different classifiers which were tested, however the use of a random forest classifier provided the best performance in 9 out of 10 primary sites (FIG. 6).

### Selection of Input Information for the Method

[0215] We next aimed to identify a set of features (i.e. a set of input information types) for our method, derived from the mutation data that could most accurately identify the primary cancer tissue site of a tumour. We used 5-fold cross validation to assess the classification accuracy using various combinations of the following sets of features:

### Mutation Status of Recurrent Cancer Genes

[0216] We chose a previously published list of 231 genes that are recurrent in cancer (Lawrence et al. 2014) (see Table 1) and counted the number of non-synonymous mutations within the coding region (or exomes) of each gene. When training a model with these features alone we achieved a cross-validation accuracy of 55% across the ten primary sites (FIG. 3). Accuracy varied among primary sites, from 36% for liver to 78% for large intestine.

### Single Base Substitution Frequency

[0217] Single base substitutions are found at different frequencies across tumours, likely reflecting the mutational processes that shaped the tumour genome. For each tumour sample, we used all base substitution mutations, regardless of their effect, to calculate the relative frequencies of the six different classes of single base substitutions based on the pyrimidine of the Watson-Crick germ-line base-pair. Base substitutions alone classified primary cancer tissue site with an overall accuracy of 48% (range=30-69%), but when combined with the mutational variables described above accuracy increased to 65% (range=51-84%) (FIG. 3).

### Trinucleotide-Context Base Substitution Frequency

[0218] For each tumour sample, we used all base substitution mutations to calculate the relative frequencies of the 96 possible single base substitutions in trinucleotides included in Table 2 herein. Single base substitutions frequencies in trinucleotides alone identified primary cancer tissue site with an overall accuracy of 58% (range=39-86%), but when combined with the mutational status variables described above accuracy increased to 66% (range=54-90%) (FIG. 3).

### Position-Specific Mutations

[0219] Of the many mutations that could occur within a gene, some may be selected for or against in different tissues, depending on which signaling pathways are active in the pre-malignant cell. Therefore, mutations at certain positions may be specific to certain cell types or primary sites; this has been described for EGFR (Lawrence et al. 2014). We identified a set of mutation hotspots, positions or gene regions that were significantly more frequently mutated in our training data than expected by chance. Addition of these hotspot features to the model using all non-synonymous mutation status within the set of 231 genes as denoted in Table 1 had no effect on accuracy (data not shown).

[0220] We next considered whether copy number profiles could improve classification performance. However, CNV data was available for only ˜40% of the samples in the COSMIC Whole Genomes database. Thus, we assessed the performance of classifiers using CNV data in a separate analysis, reducing the number of samples and thereby also the number of primary cancer tissue sites from ten to six. This increases the expected accuracy of a random classifier from 1/10=10% to 1/6=17%, and so for proper comparison we repeated some of the previous analyses on the reduced data set. In this reduced data set, non-synonymous mutation status of exons in the 231 specific genes of Table 1 mutated in cancer alone classified primary site with an accuracy of 69% (FIG. 3),

[0221] Each gene that was used for derivation of mutation status as described above was also encoded as a copy number variable (loss, gain or normal copy number). Using copy number variables alone resulted in an accuracy of 80%, and when combined with mutation status increased to 85%. Further adding one or both of single base substitution frequencies wherein the flanking bases where not taken into account and trinucleotide frequencies (single substitution frequencies wherein the identity of the two flanking bases are taken into account) increased accuracy to 87-88% (FIG. 3).

### Selection of Features and Performance on Test Data

[0222] We used the cross-validation-based results to assess which features to use in a final classifier of primary cancer tissue site. In addition to the 231 genes, with features for their mutation status and where possible copy number status, we found that overall the use of trinucleotide base substitution frequencies provided the highest accuracy (66.6% and 87,6%, without and with CNVs, respectively). We therefore applied these two models (one using mutation status in combination with trinucleotide base substitution frequencies and the other using a combination of mutation status in combination with trinucleotide base substitution and copy number variation) to the fraction of COSMIC data that had been set aside as test data. We achieved an overall accuracy of 69% and 85% without and with CNVs, respectively (FIG. 3).

[0223] We noticed that certain pairs of tissues (e.g, breast-ovary, breast-lung, and endometrium-ovary) seem to be frequently confused (Tables 4 and 5), and that the classifiers for these pairs of tissues often produce elevated output prediction scores for both.

[0224] Table 4 and 5 show that the two methods have high sensitivity, ranging from 50-91% for the different primary cancer tissue sites, and also good specificity, ranging from 93-99%.

[0225] Therefore, we defined a “confidence score” as the difference between the individual classifier output for the two highest-scoring tissues. We found that the confidence score was indeed a strong indicator of accuracy, and that a large fraction of high-confidence samples could be predicted with high accuracy (FIG. 4 and FIG. 7).

TABLE 4
Confusion matrix for the classifier based on mutations status and trinucleotide base substitutions.Total number of samples
per primary cancer tissue site are given to the left and below. Sensitivity and specificity for each primary site is given above
and to the right, respectively.

[chemical structure]

TABLE 5
Confusion matrix for the classifier based on a combination of CNVs, mutation status and
trinucleotide base substitutions. Sensitivity and specificity for each primary cancer tissue site
is given above and to the right, respectively.

[chemical structure]

[0226] In a clinical application, it would be valuable to produce a ranked list of likely tissues, suggesting the order in which these tissues might be examined in a patient. Thus, we ranked the classification scores of the individual tissue classifiers and assessed the accuracy of the cumulative tissue list; i.e. how frequently the correct tissue is in the top n proposed tissues (FIG. 5). At any number of tissues, our method was substantially more accurate than either random lists or a list of tissues ranked by frequency in the data set.

### Performance on Independent Validation Cohorts

[0227] The present section describes the validation of our method using information of mutation status in 231 genes mutated in cancer as described above in combination with trinucleotide single base substitution frequency.

[0228] First, we evaluated the performance of our classifier on the latest data from COSMIC. Our model was developed using the data in COSMIC version 68. As an independent test set we downloaded COSMIC version 70, and filtered out any samples that were already entered in v68. All data analysis steps such as quality control, alignment, derivation of mutation status, etc., which could have added a systematic bias, were performed by the authors of the original publications rather than by COSMIC; therefore this data is reasonably independent from the training data.

[0229] Since our method predicts the specific cancer types with different accuracy, we calculated the “expected” accuracy of our method for prediction of the types of cancer being present in the validation sets, and compared the predictions of our method in the validation sets to the “expected” accuracy.

[0230] The expected accuracy was calculated in the following way:

[0231] For each cancer type, m, the number of samples in the validation cohort of this cancer type, Nₘ, was multiplied by the observed sensitivity of our method towards this specific cancer type (see Tables 4 and 5), Sₘ, to give the number of samples of this cancer type expected to be correctly proposed by our method (known as true positives), TPₘ. The overall expected accuracy of our method on the validation cohort is then calculated as the fraction of all expected true positives, TP, out of the total number of samples in the validation cohort, N.

$$\frac{Σ {S}_{m} \cdot {N}_{m}}{N}$$

[0232] Sₘ; sensitivity for cancer type m of the TumorTracer method, measured by cross-validation (as found in Table 4 or 5). (number between 0 and 1)
[0233] Nₘ: the number of samples in the validation cohort (eg. COSMIC v70, or SAFIR trial) of cancer type m.
[0234] N: the total number of samples in the validation cohort

[0235] For the COSMIC v70 validation set, the “expected” accuracy was calculated using the numbers of Table 6 below:

TABLE 6

| Cancer type | Nₘ | Sₘ | EXPECTED TP_{M} | |
|---|---|---|---|---|
| Breast | 191 | 61% | 116.51 | |
| Kidney | 240 | 76% | 182.40 | |
| Large intestine | 54 | 83% | 44.82 | |
| Liver | 457 | 55% | 251.35 | |
| Pancreas | 438 | 73% | 319.74 | |
| Prostate | 61 | 58% | 35.38 | |
| Total | N = 1441 | | TP = 950.20 | 950.2/1441 = 65.9% |

Expected accuracy=950.2/1441=0.659

[0236] On this independent validation set derived from COSMIC v70, which consisted of 1439 samples from 6 primary cancer tissue sites our model correctly classified the primary cancer tissue site for 46% of the samples (ranging from 25% for kidney to 71% for pancreas) (FIG. 50).

[0237] We further applied our classifier to point mutation calls from 91 metastatic breast tumours from SAFIR, a clinical trial to assess benefit of exome sequencing for metastatic breast cancer. Mutation status (also called mutation calls) based on whole exome sequencing data for a cohort of 91 metastatic breast cancers (SAFIR trial) was obtained from the Department of Medical Oncology, Institut Gustave Roussy, Villejuif, France. These calls were derived from whole exome sequencing of tumour and matched normal material following the protocol implemented for the clinical trial. The data did not include information of copy number variation in the metastatic breast tumours.

[0238] The “expected” accuracy of the SAFIR validation set was calculated by using the following numbers:

[0239] The Safir trial consists of 91 breast cancer samples, and no other cancer types.

[0240] Sₘ=61%

[0241] Nₘ=91

[0242] N=91

Expected accuracy=0.61−91/91=0.61

[0243] Note that, because the SAFIR validation set consists of only breast cancer samples, the “expected” accuracy is by definition equivalent to the breast-specific specificity of 61% on the test set (Table 4). Our method using information of mutation status in 231 genes mutated in cancer as described above in combination with trinucleotide single base substitution frequency correctly proposed breast as the primary site in 48% of the samples (FIG. 5D). After breast, the most commonly proposed sites were prostate (18%) and ovary (16%).

[0244] FIGS. 5C and D show that the accuracy on our validation data sets is comparable to the test set COSMIC 70. The actual validation accuracy is slightly lower than the “expected” accuracy calculated based on sensitivity of the specific cancer tissue type, this is not surprising due to differences in data generation and analysis. The actual accuracy is still significantly better than a random classifier.

[0245] Thus the validation of our method shows that the method performs much better than a random method and with high accuracy.

Comparison with Existing Method

[0246] The method disclosed by Dietlein and Eschner 2014 has described a method for predicting the primary cancer tissue site based on mutation status of selected genes (Dietlein and Eschner 2014). In brief, Dietlein and Eschner used mutation data from 905 cell lines originating from 23 different tumour primary sites to select the set of position-specific and nonspecific mutations with the highest discriminatory power for a single primary site. They used this data to train their tool, ICOMS, to infer cancer origin (primary cancer tissue type) from a mutation profile.

[0247] The ICOMS method was compared to our method which uses mutation status in combination with single nucleotide substitution in trinucleotides as described above. (This method is called TumorTracer in the below text).

[0248] ICOMS was validated on a set of 431 tumours from TOGA, of which 297 were also in the version of COSMIC that we used to develop our method. To provide an unbiased comparison between the two methods, we compared ICOMS prediction calls to TumorTracer prediction calls obtained under cross-validation, and compared both to the actual primary cancer tissue sites.

[0249] The distribution of correct and incorrect inferences across the two methods is given in Table 7. Note that the two algorithms deal with uncertainty in different ways: ICOMS in some cases proposes no primary cancer tissue site, whereas TumorTracer always proposes a cancer tissue site along with a corresponding confidence score. Therefore, to do an unbiased comparison of only the high-confidence calls from the two methods, we did a second analysis omitting the lowest confidence proposals by TumorTracer, corresponding to the number of samples for which ICOMS makes no proposal, and compared the performance of each method on the 109 samples for which both methods proposed a primary cancer tissue site (Table 8). Accuracy, defined as the percentage of samples for which the correct primary site was inferred, was significantly higher by TumorTracer than by ICOMS (96% vs. 83%, p=0.003).

TABLE 7
Contingency table with number of tumours correctly
predicted by TumorTracer and by ICOMS. In 129 cases
ICOMS made no primary site diagnosis (labelled “No call”
in the table).

| | | ICOMS | | |
|---|---|---|---|---|
| | | No call | Correct | Incorrect |
| TumorTracer | Correct | 90 | 114 | 28 |
| | Incorrect | 39 | 11 | 15 |

TABLE 8
Contingency table with number of tumours correctly
predicted by TumorTracer and by ICOMS, including
only the 109 samples for which both methods
produced a high-confidence proposal.

ICOMS

| | | Correct | Incorrect |
|---|---|---|---|
| TumorTracer | Correct | 90 | 15 |
| | Incorrect | 1 | 3 |

### CONCLUSION

[0250] We developed proof-of-concept classifiers designed to identify the primary cancer tissue site of a tumour from its genomic profile. Specifically, our most accurate classifier used the point mutation status and copy number status of a set of 231 genes recurrently mutated in cancer, as well as the relative frequencies of 96 classes of single base substitutions wherein the identity of the two flanking bases are taken into account. Our single most accurate classifier used the point mutation status of a set of 231 genes recurrently mutated in cancer, in combination with the relative frequencies of 96 classes of single base substitutions wherein the identity of the two flanking bases are taken into account. The latter method was found to have an improved predictive performance compared to a state of the art method for prediction of primary cancer tissue site (ICOMS). As more mutation data becomes available, it will likely be possible to increase accuracy and to develop classifiers for additional tissues, which may involve additional genes.

### REFERENCES

[0251] Alexandrov L B, Nik-Zainal S, Wedge D C, et al. (2013a) Signatures of mutational processes in human cancer. Nature 500:415-421. doi: 10.1038/nature12477

[0252] Alexandrov L B, Nik-Zainal S, Wedge D C, et al. (2013b) Deciphering Signatures of Mutational Processes Operative in Human Cancer. CellReports 3:246-259. doi: 10.1016/j.celrep.2012.12.008

[0253] Altschul S F, Gish W, Miller W, Myers E W, Lipman D J (1990) Basic local alignment search tool. J Mol Biol. 1990 Oct. 5; 215(3):403-10.

[0254] Bamford S, Dawson E, Forbes S, et al, (2004) The COSMIC (Catalogue of Somatic Mutations in Cancer) database and website. Br J Cancer. doi: 10.1038/sj.bjc.6601894

[0255] Baudis M (2007) Genomic imbalances in 5918 malignant epithelial tumors: an explorative meta-analysis of chromosomal CGH data. BMC Cancer 7:226. doi: 10.1186/1471-2407-7-226

[0256] Beroukhim R, Getz G, Nghiemphu L, et al. (2007) Assessing the significance of chromosomal aberrations in cancer: methodology and application to glioma. Proc Natl Acad Sci USA 104:20007-20012. doi: 10.1073/pnas.0710052104

[0257] Breiman L (2001) Random forests. Machine learning 45:5-32.

[0258] Cibulskis K, Lawrence M S, Carter S L, Sivachenko A, Jaffe D, Sougnez C, Gabriel S, Meyerson M, Lander E S, Getz G. Sensitive detection of somatic point mutations in impure and heterogeneous cancer samples. Nat Biotechnol. 2013 March; 31(3):213-9. doi: 10.1038/nbt.2514. Epub 2013 Feb. 10. PubMed PMID: 23396013; PubMed Central PMCID: PMC3833702.

[0259] Chen L L, Blumm N, Christakis N A, et al. (2009) Cancer metastasis networks and the prediction of progression patterns. Br J Cancer 101:749-758. doi: 10.1038/sj.bjc.6605214

[0260] Dietlein F, Eschner W (2014) Inferring primary tumor sites from mutation spectra: a meta-analysis of histology-specific aberrations in cancer-derived cell lines. Hum Mol Genet 23:1527-1537. doi: 10.1093/hmg/ddt539

[0261] Favero F, Joshi T, Marquard A M, Birkbak N J, Krzystanek M, Li Q, Szallasi Z, Eklund AC (2014) Sequenza: allele-specific copy number and mutation profiles from tumor sequencing data. Ann Oncol. 2014 Oct. 15, pii: mdu479, [Epub ahead of print]

[0262] Hess K R, Abbruzzese M C, Lenzi R, et al. (1999) Classification and regression tree analysis of 1000 consecutive patients with unknown primary carcinoma. Clin Cancer Res 5:3403-3410.

[0263] Kim S Y, Speed T P (2013) Comparing somatic mutation-callers: beyond Venn diagrams. BMC Bioinformatics 14:189. doi: 10.1186/1471-2105-14-189.

[0264] Koboldt D C, Zhang Q, Larson D E, Shen D, McLellan M D, Lin L, Miller C A, Mardis E R, Ding L, Wilson R K. VarScan 2: somatic mutation and copy number alteration discovery in cancer by exome sequencing. Genome Res. 2012 March; 22(3):568-76. doi: 10.1101/gr.129684.111. Epub 2012 Feb. 2. PubMed PMID: 22300766; PubMed Central PMCID: PMC3290792.

[0265] Langmead B, Salzberg S L. Fast gapped-read alignment with Bowtie 2. Nat Methods. 2012 Mar. 4; 9(4):357-9. doi: 10.1038/nmeth.1923. PubMed PMID: 22388286; PubMed Central PMCID: PMC3322381.

[0266] Lawrence M S, Stojanov P, Mermel C H, et al, (2014) Discovery and saturation analysis of cancer genes across 21 tumour types. Nature 505:495-501. doi: 10.1038/nature12912

[0267] Lawrence M S, Stojanov P, Polak P, et al. (2013) Mutational heterogeneity in cancer and the search for new cancer-associated genes. Nature 499:214-218, doi: 10.1038/nature12213

[0268] Li H, Durbin R. Fast and accurate short read alignment with Burrows-Wheeler transform (2009) Bioinformatics. 2009 Jul. 15; 25(14):1754-60. doi: 10.10931bioinformatics/btp324.

[0269] Langmead B, Trapnell C, Pop M, Salzberg S L (2009) Ultrafast and memory-efficient alignment of short DNA sequences to the human genome. Genome Biol. 2009; 10(3):R25. doi: 10.1186/gb-2009-10-3425.

[0270] Liaw A, Wiener M (2002) Classification and Regression by randomForest. R News 2:18-22.

[0271] Ma X-J, Patel R, Wang X, et al. (2006) Molecular classification of human cancers using a 92-gene real-time quantitative polymerase chain reaction assay. Archives of pathology & laboratory medicine 130:465-473.

[0272] Mitelman F, Mertens F, Johansson B (1997) A breakpoint map of recurrent chromosomal rearrangements in human neoplasia. Nat Genet 15 Spec No:417-474. doi: 10.1038/ng0497supp-417

[0273] Pavlidis N, Pentheroudakis G (2012) Cancer of unknown primary site. Lancet 379:1428-1435. doi: 10.1016/S0140-6736(11)61178-1

[0274] Ramaswamy S, Tamayo P, Rifkin R, et al, (2001) Multiclass cancer diagnosis using tumor gene expression signatures. Proc Natl Acad Sci USA 98;15149-15154. doi: 10.1073/pnas.211566398

[0275] Rosenfeld N, Aharonov R, Meiri E, et al. (2008) MicroRNAs accurately identify cancer tissue origin. Nat Biotechnol 26:462-469, doi: 10.1038/nbt1392

The application's sequence listing, which the Patent Office published only in electronic form, follows.

SEQUENCE LISTING (231 sequences)

SEQ ID NO: 1 - DNA, 2670 bp, Homo sapiens
atgagcaacccattcgcacaccttgctgagccattggatcctgtacaaccaggaaagaaattcttcaatttgaataaattggaggattcaagatatgggcgcttaccattttcgatcagagttcttctggaagcagccattcggaattgtgatgagtttttggtgaagaaacaggatattgaaaatattctacattggaatgtcacgcagcacaagaacatagaagtgccatttaagcctgctcgtgtcatcctgcaggactttacgggtgtgcccgctgtggttgactttgctgcaatgcgtgatgctgtgaaaaagttaggaggagatccagagaaaataaaccctgtctgccctgctgatcttgtaatagatcattccatccaggttgatttcaacagaagggcagacagtttacagaagaatcaagacctggaatttgaaagaaatagagagcgatttgaatttttaaagtggggttcccaggcttttcacaacatgcggattattccccctggctcaggaatcatccaccaggtgaatttggaatatttggcaagagtggtatttgatcaggatggatattattacccagacagcctcgtgggcacagactcgcacactaccatgattgatggcttgggcattcttggttggggtgtcggtggtattgaagcagaagctgtcatgctgggtcagccaatcagtatggtgcttcctcaggtgattggctacaggctgatggggaagccccaccctctggtaacatccactgacatcgtgctcaccattaccaagcacctccgccaggttggggtagtgggcaaatttgtcgagttcttcgggcctggagtagcccagttgtccattgctgaccgagctacgattgctaacatgtgtccagagtacggagcaactgctgcctttttcccagttgatgaagttagtatcacgtacctggtgcaaacaggtcgtgatgaagaaaaattaaagtatattaaaaaatatcttcaggctgtaggaatgtttcgagatttcaatgacccttctcaagacccagacttcacccaggttgtggaattagatttgaaaacagtagtgccttgctgtagtggacccaaaaggcctcaggacaaagttgctgtgtccgacatgaaaaaggactttgagagctgccttggagccaagcaaggatttaaaggattccaagttgctcctgaacatcataatgaccataagacctttatctatgataacactgaattcacccttgctcatggttctgtggtcattgctgccattactagctgcacaaacaccagtaatccgtctgtgatgttaggggcaggattgttagcaaagaaagctgtggatgctggcctgaacgtgatgccttacatcaaaactagcctgtctcctgggagtggcgtggtcacctactacctacaagaaagcggagtcatgccttatctgtctcagcttgggtttgacgtggtgggctatggctgcatgacctgcattggcaacagtgggcctttacctgaacctgtggtagaagccatcacacagggagaccttgtagctgttggagtactatctggaaacaggaattttgaaggtcgagttcaccccaacacccgggccaactatttagcctctccccccttagtaatagcatatgcaattgctggaaccatcagaatcgactttgagaaagagccattgggagtaaatgcaaagggacagcaggtatttctgaaagatatctggccgactagagacgagatccaggcagtggagcgtcagtatgtcatcccggggatgtttaaggaagtctatcagaaaatagagactgtgaatgaaagctggaatgccttagcaaccccatcagataagctgtttttctggaattccaaatctacgtatatcaaatcaccaccattctttgaaaacctgactttggatcttcagccccctaaatctatagtggatgcctatgtgctgctaaatttgggagattcggtaacaactgaccacatctccccagctggaaatattgcaagaaacagtcctgctgctcgctacttaactaacagaggcctaactccacgagaattcaactcctatggctcccgccgaggtaatgacgccgtcatggcacggggaacatttgccaacattcgcttgttaaacagatttttgaacaagcaggcaccacagactatccatctgccttctggggaaatccttgatgtgtttgatgctgctgagcggtaccagcaggcaggccttcccctgatcgttctggctggcaaagagtacggtgcaggcagctcccgagactgggcagctaagggccctttcctgctgggaatcaaagccgtcctggccgagagctacgagcgcattcaccgcagtaacctggttgggatgggtgtgatcccacttgaatatctccctggtgagaatgcagatgccctggggctcacagggcaagaacgatacactatcattattccagaaaacctcaaaccacaaatgaaagtccaggtcaagctggatactggcaagaccttccaggctgtcatgaggtttgacactgatgtggagctcacttatttcctcaacgggggcatcctcaactacatgatccgcaagatggccaagtag

SEQ ID NO: 2 - DNA, 1518 bp, Homo sapiens
atggcggagtcggccggagcctcctccttcttcccccttgttgtcctcctgctcgccggcagcggcgggtccgggccccggggggtccaggctctgctgtgtgcgtgcaccagctgcctccaggccaactacacgtgtgagacagatggggcctgcatggtttccattttcaatctggatgggatggagcaccatgtgcgcacctgcatccccaaagtggagctggtccctgccgggaagcccttctactgcctgagctcggaggacctgcgcaacacccactgctgctacactgactactgcaacaggatcgacttgagggtgcccagtggtcacctcaaggagcctgagcacccgtccatgtggggcccggtggagctggtaggcatcatcgccggcccggtgttcctcctgttcctcatcatcatcattgttttccttgtcattaactatcatcagcgtgtctatcacaaccgccagagactggacatggaagatccctcatgtgagatgtgtctctccaaagacaagacgctccaggatcttgtctacgatctctccacctcagggtctggctcagggttacccctctttgtccagcgcacagtggcccgaaccatcgttttacaagagattattggcaagggtcggtttggggaagtatggcggggccgctggaggggtggtgatgtggctgtgaaaatattctcttctcgtgaagaacggtcttggttcagggaagcagagatataccagacggtcatgctgcgccatgaaaacatccttggatttattgctgctgacaataaagataatggcacctggacacagctgtggcttgtttctgactatcatgagcacgggtccctgtttgattatctgaaccggtacacagtgacaattgaggggatgattaagctggccttgtctgctgctagtgggctggcacacctgcacatggagatcgtgggcacccaagggaagcctggaattgctcatcgagacttaaagtcaaagaacattctggtgaagaaaaatggcatgtgtgccatagcagacctgggcctggctgtccgtcatgatgcagtcactgacaccattgacattgccccgaatcagagggtggggaccaaacgatacatggcccctgaagtacttgatgaaaccattaatatgaaacactttgactcctttaaatgtgctgatatttatgccctcgggcttgtatattgggagattgctcgaagatgcaattctggaggagtccatgaagaatatcagctgccatattacgacttagtgccctctgacccttccattgaggaaatgcgaaaggttgtatgtgatcagaagctgcgtcccaacatccccaactggtggcagagttatgaggcactgcgggtgatggggaagatgatgcgagagtgttggtatgccaacggcgcagcccgcctgacggccctgcgcatcaagaagaccctctcccagctcagcgtgcaggaagacgtgaagatctaa

SEQ ID NO: 3 - DNA, 3309 bp, Homo sapiens
atgttccaacttcctgtcaacaatcttggcagtttaagaaaagcccggaaaactgtgaaaaaaatacttagtgacattgggttggaatactgtaaagaacatatagaagattttaaacaatttgaacctaatgacttttatttgaaaaacactacatgggaggatgtaggactgtgggacccatcacttacgaaaaaccaggactatcggacaaaacctttctgctgcagcgcttgtccattttcctcaaaattcttctctgcctacaaaagtcatttccgcaatgtccatagtgaagactttgaaaataggattctccttaattgcccctactgtaccttcaatgcagacaaaaagactttggaaacacacattaaaatatttcatgctccgaacgccagcgcaccaagtagcagcctcagcactttcaaagataaaaacaaaaatgatggccttaaacctaagcaggctgacagtgtagagcaagctgtttattactgtaagaagtgcacttaccgagatcctctttatgaaatagttaggaagcacatttacagggaacattttcagcatgtggcagcaccttacatagcaaaggcaggagaaaaatcactcaatggggcagtccccttaggctcgaatgcccgagaagagagtagtattcactgcaagcgatgccttttcatgccaaagtcctatgaagctttggtacagcatgtcatcgaagaccatgaacgtataggctatcaggtcactgccatgattgggcacacaaatgtagtggttccccgatccaaacccttgatgctaattgctcccaaacctcaagacaagaagagcatgggactcccaccaaggatcggttcccttgcttctggaaatgtccggtctttaccatcacagcagatggtgaatcgactctcaataccaaagcctaacttaaattctacaggagtcaacatgatgtccagtgttcatctgcagcagaacaactatggagtcaaatctgtaggccagggttacagtgttggtcagtcaatgagactgggtctaggtggcaacgcaccagtttccattcctcaacaatctcagtctgtaaagcagttacttccaagtggaaacggaaggtcttatgggcttgggtcagagcagaggtcccaggcaccagcaagatactccctgcagtctgctaatgcctcttctctctcatcgggccagttaaagtctccttccctctctcagtcacaggcatccagagtgttaggtcagtccagttccaaacctgctgcagctgccacaggccctcccccaggtaacacttcctcaactcaaaagtggaaaatatgtacaatctgtaatgagctttttcctgaaaatgtctatagtgtgcacttcgaaaaagaacataaagctgagaaagtcccagcagtagccaactacattatgaaaatacacaattttactagcaaatgcctctactgtaatcgctatttacccacagatactctgctcaaccatatgttaattcatggtctgtcttgtccatattgccgttcaactttcaatgatgtggaaaagatggccgcacacatgcggatggttcacattgatgaagagatgggacctaaaacagattctactttgagttttgatttgacattgcagcagggtagtcacactaacatccatctcctggtaactacatacaatctgagggatgccccagctgaatctgttgcttaccatgcccaaaataatcctccagttcctccaaagccacagccaaaggttcaggaaaaggcagatatccctgtaaaaagttcacctcaagctgcagtgccctataaaaaagatgttgggaaaaccctttgtcctctttgcttttcaatcctaaaaggacccatatctgatgcacttgcacatcacttacgagagaggcaccaagttattcagacggttcatccagttgagaaaaagctcacctacaaatgtatccattgccttggtgtgtataccagcaacatgaccgcctcaactatcactctgcatctagttcactgcaggggcgttggaaagacccaaaatggccaggataagacaaatgcaccctctcggcttaatcagtctccaagtctggcacctgtgaagcgcacttacgagcaaatggaatttcccttactgaaaaaacgaaagttagatgatgatagtgattcacccagcttctttgaagagaagcctgaagagcctgttgttttagctttagaccccaagggtcatgaagatgattcctatgaagccaggaaaagctttctaacaaagtatttcaacaaacagccctatcccaccaggagagaaattgagaagctagcagccagtttatggttatggaagagtgacatcgcttcccattttagtaacaaaaggaagaagtgtgtccgtgattgtgaaaagtacaagcctggcgtgttgctggggtttaacatgaaagaattaaataaagtcaagcatgagatggattttgatgctgagtggctatttgaaaatcatgatgagaaggattccagagtcaatgctagtaagactgctgacaaaaagctcaaccttgggaaggaagatgacagttcctcagacagttttgaaaatttggaagaagaatccaatgaaagtggtagcccttttgaccctgtttttgaagttgaacctaaaatctctaacgataacccagaggaacatgtactgaaggtaattcctgaggatgcttcagaatctgaggagaagctagaccaaaaagaggatggttcaaaatacgaaactattcatttgactgaggaaccaaccaaactaatgcacaatgcatctgatagtgaggttgaccaagacgatgttgttgagtggaaagacggtgcttctccatctgagagtgggcctggatcccaacaagtgtcagactttgaggacaatacctgcgaaatgaaaccaggaacctggtctgacgagtcttcccaaagcgaagatgcaaggagcagtaagccagctgccaaaaaaaaggctaccatgcaaggtgacagagagcagttgaaatggaagaatagttcctatggaaaagttgaagggttttggtctaaggaccagtcacagtggaagaatgcatctgagaatgatgagcgcttatctaacccccagattgagtggcagaatagcacaattgacagtgaggatggggaacagtttgacaacatgactgatggagtagctgagcccatgcatggcagcttagccggagttaaactgagcagccaacaggcctaa

SEQ ID NO: 4 - DNA, 1617 bp, Homo sapiens
atggagcggttaggagagaaagccagtcgcctgctggagaagttcggccgcagaaagggtgaatctagccggtctgggtctgacgggacccccgggccgggcaaggggcgcctaagtgggttggggggacctaggaagtcagggccccgaggagctactgggggacctggggatgagccgttggagccggcccgggagcaaggttccctggacgctgagcgaaatcagcgcggctcctttgaggcgccgcgctacgaaggctcttttcccgcggggccgccgcccacccgggccttgcctctacctcagtcgttgccccccgattttcggctggagcccacggccccggccctcagcccccgctctagcttcgccagtagctcggccagcgacgcgagcaagccgtccagcccccggggcagcctgctgctggacggggcgggggctggcggagctggaggtagccggccctgcagcaatcgcaccagcggcatcagcatgggctacgaccagcgccacgggagccccttgccagcggggccgtgcctgtttggcccacccctggccggagcaccggcaggctattctcccggaggggtcccgtccgcctacccggagctccacgccgccctggaccgattgtacgctcagcggcccgcggggttcggctgccaggaaagccgccactcgtatcccccggccctgggcagccctggagctctagccggggccggagtgggagcggcggggcccttggagagacggggggcgcaacccggacgacactctgtgaccggctacggggactgcgccgtgggcgcccggtaccaggacgagctaacagctttgcttcgcctgacggtgggcaccggtgggcgagaagccggagcccgcggagaaccctcggggattgagccgtcgggtctggaggagccaccaggtcctttcgttccggaggccgcccgggcccggatgcgggagccagaggccagggaggactacttcggcacctgtatcaagtgcaacaaaggcatctatgggcagagcaatgcctgccaggccctggacagcctctaccacacccagtgctttgtttgctgctcttgtgggcgaactttgcgttgcaaggctttctacagtgtcaatggctctgtgtactgtgaggaagattatctgttttcagggtttcaggaggcagctgagaaatgctgtgtctgtggtcacttgattttggagaagatcctacaagcaatggggaagtcctatcatccaggctgtttccgatgcattgtttgcaacaagtgcctggatggcatccccttcacagtggacttctccaaccaagtatactgtgtcaccgactaccacaaaaattatgctcctaagtgtgcagcctgtggccaacccatcctcccctctgagggctgtgaggacatcgtgagggtgatatccatggaccgggattatcactttgagtgctaccactgtgaggactgccggatgcagctgagtgatgaggaaggctgctgctgtttccctctggatgggcacttgctctgccatggttgccacatgcagcggctcaatgcccgacaaccccctgccaactatatctga

SEQ ID NO: 5 - DNA, 1443 bp, Homo sapiens
atgagcgacgtggctattgtgaaggagggttggctgcacaaacgaggggagtacatcaagacctggcggccacgctacttcctcctcaagaatgatggcaccttcattggctacaaggagcggccgcaggatgtggaccaacgtgaggctcccctcaacaacttctctgtggcgcagtgccagctgatgaagacggagcggccccggcccaacaccttcatcatccgctgcctgcagtggaccactgtcatcgaacgcaccttccatgtggagactcctgaggagcgggaggagtggacaaccgccatccagactgtggctgacggcctcaagaagcaggaggaggaggagatggacttccggtcgggctcacccagtgacaactcaggggctgaagagatggaggtgtccctggccaagcccaagcaccgcgtgaccatgaacgagtttgagtacctgaagctgctgggcaagggcactttcggcaaggtgatcctggtgaaggagaaggccacaggccgctactacgccatgaagatcctcaagaaggaagtcatcgtggccaaggacgaggtggcccacacactcaccgagaaccgcgtcctgcagaactccaggcaccccttcctcacagccctgaagtactctttccagacccacgaccgcctctgctttgtcatggagtacgccaacgggggcgagctgttcttccacctgtcccgggagcgtgtgttctccgaggaccgggcccgcttctatggcgctgagattgtgtcagccctggactacctgcactcggagaagaacgtggtgtaccgggacctcaagctggagaacctcatgctggacaaggacgggcacattaagatcacagacttcgggctgtgcaaggaggggatcaaggacggtgccaccatgaagaccttttgcggcacacctgagtacctggcccccgaggtgctggaggacaatgactacggccgtgcagtggactggtgggggctgggcgtggtcatgtacgagatgatgtgcggtcgcctgcccttctacaaccaggaccatgagaagctttttgagctcatcctcatggaggagatccgcttcccgcgcacgcttggtcccgaggccaagtccttgctttcagggctgctcaagaaggaccccaagcagaggcttggcgggggctccgaggacgccaaggagatcatgcagcatcgcttctttgccggtatcgtgtggcagcacgtgtacgagaagaagctcagcccacccttcaagccccaggtcacgtcggagactgacaccaggtattttgatgaggagttcacggcccagatgatcaccatcacaccacctgaccaagatgacagcatggagtgtgtggacagcgagcgcaggccccacttcccccagttctcctactcggccagcggcacggcctga

SEQ ID NO: 6 - DNA, 4863 bp, Homo sapiens
atgggagccatcgggctcctgtggctcctgccgctgctgctttccacggcagctgtgggctccgggatggggaccggccagcgcgcgggctccccagctgcggggccgccgctgcagccccgggagccactcagctactcgcgcctgcagaggaagagtctggcagttgacttcgtggtgccctcgctcttccgtgtctacgcccgggacctactgctgccaccatcctcctcggagctgaaggctggcaggcccgaggcccgcggctcgctagctctggactgcgccccgctgctcaggttgctggggccggcgccgggggtctcctggaccgccggttcaccagccccggcagaggcccggacgctgtccagggtgctgaagggcggctccgtgcgcaagctccggcgtgccaagcagttggtgctggagctgggcgaggaggcgatcttggagggttgcgtcgggccccccggggaggcggctgtggggctgctccagttcaatctcagcgagctgttcagttggtggattcgccaaggcgaagggcgactgaggatccgcctgatgcccgagaagaaggcgtcggaagtgggcagagagggaaggctgtccgcggcaattcgcgcctcccagccccgccttctcttccagatcttcgggactggtcatagctccttggaatcaccaacaaacatgccttctccttctcctgattattttacatggaatctcacctggataatgaaagactccttccctttcctgtctcatcgcagccgatatggtctggagtgcagctttgacttcccctgtgagctggagtattcccctccactgcatgacctcaggaaccagagctggtcctggcgccgcatcccctccgaggaggcctcccagatggacttgctggatgggcctggggcagagcgttctaaggagatgcccagaggctcctttctccttctcaacacctcagctgactccaagcacaccatcctgagtccgtggatgaggagcagcagtgagcactgcacactggccgtctcggtgcacaggcacctgcagccctctggaaggtacattgcccagctgctgccccacaacgaggctgcaagagagatcctcctgatgcccactccagggaagcatggttggacagtgctccagggaagaatcgggcgtccagacaacccatttcgagtggccctggaatacatctccagtggaaaccgcagcttgtctgcagtggacttctttgccctgaagaactgcagtgaaggaacatccccaggctccaagatggccctgcagagctccttcacttgttggaatgggacagtcctccagcttgggcaggcctgtgacttccaccaggactgtgcccagggagaagatgagagccagatgtgccggaaactgcctgtgggtttttactgcaactttgaagatggcttctgtggctggacccaaggcacactgtcaccccacactcctcaatggcaggtcaggaccctaaaggatgcccggttccaggaccaccaagaccatgctctattgctcagtaccactgatgtccccgcttctgaaagtgctacagtgaccagtgctacgtttcctgcaccgatcaagagctctccatgtgagctccgaatgtcctggctcattcgtggagtcttgaggggaaacgtgtccttggtgctagtggagaacaaaaccgggaaggagcaaggcaggatggtctggcatgtcgccgcctatgaaggcttgagcctgtggcagtggatggtgttgcctctcctcgatgtgtctgacaggttctggctgcagatggtcgcatggtggggacaaggatccagagccatcgtggcttttgacaatatctccatcagcctggactgctacctcaccattagcggagaggacaagatcctgcagaatacagcacccaaatcaagaaacctgtttgagagaaacccaaacaaggagctgaaacccggggaaaattcaccaagacagacccccatctttgaccctacagttcattggctgttcaccacatgtggggccagcgggccccatggccccacccaggcacagtgcaacaacgcctaccagaactccaacctgagcgtggaggtggggagcgagggccccctgaaaggcatccagatctggaaggtgccagccaccgacacctacagcatctcgggctacggagctgctggcgggaaaggcgggaagaacaccatgatgcggtcccacggcgtgtctgtgctgggcatcttcaacctggagaaggatgacatgctgtacatcctggttgggcagcagggagaggacgcctgccccagtacaaaccagttaatccagaaagtctgcattggagagaacaatgtgatagaagaagaaatccgtgtgaacagaagcgtgcatgagtgggcaggaggcggaggaggagggggtggagccacctacgtatttaagatgaaggatggagtgccggtgcccctgatcattgcagccggaggtggtggcagggcctacggggccaagacagacacgttccacccagagagactggagaataactcctcggttctagggctaaacggcaattccggagccgcaggtggtggaggtggctggaatgataacacttccttgctctgggccggaaaatctttgcaggagggtgccaccggaggacattcctgcccccaggccatgaagaagtgggggtgggagacaagagggggtttcggagggggtggaggggggtgctcctcaggtggaggaggcggaggatatataggcggcaatgcagcctcaaacaatgaccccgaaatggatggggaagatggggtttccttcatcagtccactgggcatcctgtacaccccagctttaaaagtgatggaaggccacggggaagtgaatattaagcattatctaaactgcagtcactgtgaggtagacgaatgtcacatggaccctgaaagccacaaggtcatctgcttctgtgaccacgggacggtgctggctgaggatggcgtctcctgcattgtgtcacccaccccggagccacacctgccactctcgctgatcctctctgtggtgacctctgccctcgtggccgccctggtcctggctttctccggcatcatgattgtgtaccgccggaagcaccaggagctgcaagccatgcagatggagctgcagagccctgagtacaagctgagcaagctccgcacctcgaccatcatgaccgactacaaccccaactactgctttgctggcaagacctcctccatcagtgacctgaaggaggtgccgcggaaaaacatcaccctcattcggggtctgggccatggcgcctttggggaggtgtatgaaggccaggtgtccggaatgcccaacgacccaagccccctgcaagtggctgtgaagacgctgcctgaagtgtgctctgaacaggacgaactggatttcctcatggaagccctgatcatcagcaaattcaaccaccagaacattgttcgctgcattggggtgagcctgcaatccctgccccggttcatcctgctggagctcatggcggggggagacctcaagtccttcctccgagagacccgccctcgcccgagccagccctcctccctggccatgctggaccttctgcacgtggctcgggacattgcctgtggctgtcagtatttggaggaaaaccacttcatccaccgagacattgctgccagaaactgcctcttgacctgtccaggccctggaagagtggccaagattggagacttcgggatggcccgagacatctacagggcgagctactatagaaagggaggctgtgccatgctgccagttaagtggatgcccccagaggccttcatggaaggaatattcacttctaaaacagacacatggtcctttggagtgctgctatgggaaatcttttctcttggatatatgccataccccagcaaaagcaaccaggaagttctggagtttgtcaccagtggaggccggatggacccacccaagaactgccctgggcctgtataccggataatgactcagtgctggcaacatcagcctgaagacaggcccaactttgccatcattttggagaggattgaatactgcacccaggacccggatgtaatcaacaccgctttgccgatagaatatggtccacttgtggaagaggaagagaaagtgcctgtgaggcccaaggaccctgagggggttcctcctctcctggtctctcaacaggcaaaacgggaggaggagcgcagcccagctgccccaccacctctgcctaccacctcctctggcaaggctgcaaagaaacccacagctgcagagatctctgttcgagtccctagagggccggccgtggaagggggacacgtgaatatggcattctctcagtccaaccctccttcggagttgcacaaggtccacggatccagaaacaagcccaccagcttgtggaacccaacgtacggctcctggtttacagagaaacccaccaaaaagaataatcctatagcaaagaaggagccacacgacaggggtaacctggggctggagggaagctgtactgtcccacctaacgttgcaactgggagacttccgggggcctcactgctcctagagccctcttcgctgactgccaatatgaaggaggtacctctgttcaggctacgtcacttcccttgtgggaatgtcaattacggctaccagcaacagggcttgcccttagaagccgctactgcccctggagctggtcattacgaggataccattctgaaaagcaagaatagcatgaaccagcctgggccctga

SEQ ID NO: 7 - DNA, 801 bp, Homo sapiens
atggctgggagggggatggggatgttgaatttggaaattggaggggacgctggtggacggattgggtgcaaggagttggtgttgatggaggagcaggacgccagagtcccagccctggaaccgttcagagtggagcaggcaccacctgtaatctactatgtccctgacttcatctccaaagaagaggaggagtatttgcttcgacaggtttttaatgccccaaagccaaagtggacccagctctctgggagaaagttacagaactggggtgggcttcctcatccccgagggatggttcctgagcggctgcccccatggctccagcgctacgtggacaaagtgtcaaacctcagcctctttggaggcctcccagctaaccatgtcctcgtgaaccagtatctgcctggggagggcatcatgccccacgaggacggaccactgtactacccgactgtcagcaccatcagcctgggctcccacaccgtgctggacttctacgagccgcggcggccagaggacgatgaccctacagaacagcctcggcctccgccccggcccaccacctcgctactgctggaaccgcgcagcctgctggtgctccgcggccccgcctacacgcgtcttctccacggcatcgccgccgcccgcgtagacgcgctggacgccgcctcctcgccgcccaatgcggcagcctgcccgtcggcgcggccgggagcctgcctggtgcgcggcacccgggtctcgctgaccatccgccgcgtgccccgcgtgctgcgcgccggcctcctgctgggcaagtga

SEQ ID NO: 8 - DNA, 6513 bp, Homo sapiens
atgaaagactccgaagggccccagaggcccccgctgtgttttttatctacattgctttcccagaaggttcctgagaagtcagacgctgtgcttcgctgcataatatctggtcagcccaagccagaggtaacttggtataagaatggtcaggccatcgatgggagtggcattatttccaactatgaattctttgagaatcagtatattcatgtgttacatctctcttgctgtaccaaaaatgatgctgctgtctatcaaatctcggctaaaaactcttttggaatgatctgttgttctgcttccgttgaggttgagtgctcatcagagaacccacaattgtctcctaacctggaagatgacagggacaggggttggaaacatgaaacagggacacatgaagaagaaagggcaaatcagattgatgagaaggaacatccttataaggaagaagaaagcatctccccgggcactcccaggtcagctgactcctccccctccaaatccaaccattcactctccctccagtcattgggcaatcttgacattagtgtgtccagttctgaaaatcctttgggtgttaaaggaacaaggcacactggagaggcttatgatccaagtaacacagaagaaattgcaaatgggttgctttttcttaattcaagtcatatttatgaaaaacaagacagatgttgccacaagacagtgcattccatggcatcaaagttcacggatggtgacctgaacaatgatggtcctcatgatgaaggcttacgctctagtcagcaaaatcccaaagtacagaaatacattagcttcagcctcccgctatctgaggcaactgcacacatttacccaggtgacagtgccgtggccaacaaacaacccagcccacagctttccagtgaagactctgacagtgactatgaactttgcccagagataaccctaacctacaccgaggagttttcagatgatgacctggagtatctggaatgttctgatgttatgacggattactctaatgcagtttggcaaaggaacctgctggggactgagcatgtttttttattagaaagcgatgacgaagagatggaattcggtgagcattgcctgggtgggtgtgagcatttcctcagtggaatgggttgtgggtctcgggtgtcgggtgacgctgggcctatggttgccactgctggcttctgtggtcatcactcacaaccccaagaagttggggtgaggagcagcagagtctccaagcacggtccctcatccccacaaacagggatgactctcattttgggacctcaccaggatggaacgtcttcagtgacagaacaggggagatataaactccccactgctcccgaggctgctgaaaatgattatccaggaattcaaggagaaaccagagacagccaccaagcaagagaggaatttgccagtgacaatctgctcaacatggatgaatcagtaagagagacagagatgaagctcttgtctggtgagtcagaaaactcagggatgagccagtgttgggagacggcagctgacaagagagtggggggaaaggacttatggagcaagaggggttcaaggaaatctgccagggtgaggcagccgggaatgaagggaaatcccaagaagccgaatgccaacctgagagaaagtacaacagaaggtacccttcatctctgctctgccaaagaatctgctgagcccccactaacccagagtgataaaagagagacttctcacaccacagcagcagcgactggtcggagttcccatgctgatgcaagagaatgtgctatttcaacccaggcagagcaagaagcaaaaacccttcaaacttcaacagactcagtctccaaagaaggcaacacaaattgcaagggagaaggcatgcaagttaatactctatttgaaacaagccaggttccagactggagtgatcctcctcaggtacaagttcaggaaacagtcagagagacaatctcttgcagccagatgccagctttctcagagcctgctggggaggagtccccattcactgggaccacaacaatttccttctcaaacttaggaggggtccacaaggaaaatgcatcattagctcaacactcggaggtcaaaccctgtacctgtggtccacagcatgaagaaaaacaagacagagatggcaacatacctgacaatttcagggaagacctaaaatatgagcagagcatctcagaagccaatgatgagactatgtccccaggtgtgttctcaaggcatctccccaaggatgctcgtgctgacttcagggagcctgtggctgtctctgttgcttcccctgaacccacagatactgccctcaccctggaaaatgtgtgtgatgagccaagggacagagaagcagtgtgtgcaatggagtgttttgaggctggtgaccaaggaacgtgttttgataccatagattctcttgttgggagaccagttgataaatattcgcctcaagaaatttgctctgtagatacggaactggcagaaggtcaaaacaaagtatctgatttatgttcttctaatgacaagacactggaagtcttttttcagacacaagtgtctgagacttcagtgtctacgtgcaaaagcagcaaggacggcaactcagtcatgtcccctctttttaccagtactttcaccttgaacatttcacacacagctagtgaaggtgccacaggagaaaatctagccaaggtggagaattccacctacccactggcctccacagtacatgctggccaggagcagccaagccccagcaactcaggagggcttgatgaaacacagctcctttcttctgagaacaatcctttagtgcaatttaaagaaggaggtgacaagagccccagtcctagtgccgcagacaccacagccacaccagccagttatagttcaattgtgagttttccttgggagaagccaacaacattaactgctaataatgagtgctttcaagcgaccagggagactgaggacacatcaactgttaccattgccaccgaagtccacccagccaaataccttgctgtgtcaattcctgaggacaagcatgcaggtggcactgaggagaggttccctcgtgcatcccatgaaaaggtttcccaatttccttcccaagtgcagttggatcatattttaagtggtgctaccatcaaatctacaaaagagctactttgcagggcacccagtgtgccaggagtcccacaccatgtcctgcagctcccagagggagagggtttctgcagtaattcccctcttcaggttgataacctgtctggagataagagccagactgtggacagagcagactttaggagctatgaagagaatttccaagaaagaggaagtgaaacaaagcagggggtccagcagcagagcctgtcccagcagggttctctttctgcacctgatttccaacaaagtttgcctacgacatctgctgcacaagaggaaagaaacttggtgcccacggcccactcacccgcaagctctagggaaggagcagggcagcgctcaggttgggggacgagggtctccgtggtggctgaaactgctggggaagaagacagtcaggctctgagcaacgttccatctctctctgatatccttttggaagagtctaaagaatatagacctggaaattgggaggcaggcaacaagctgaagattataactctagaggcttccgcttctgaaatctggccaccacgacaactgacaaattctgagagcaaggcatcagacggtggtctcataattcctgacaaggtctgggctgtacctgatagtctaaaggcagatgctgttgtgcctgaattggccccctctgaaatagcagcattggctcacagtccagaggatgctgagtcagcccttgctgatagcagagaaagccataaaggcgaagagcccaccatcagtgtacattggagaagtctttcttcccggggtttcagccaacccagactcctggagtcatccgtggaccctgtagatgaaaaggagttatctgtcacagattcactgtcagcggcttctgaaactggagggaaggaaaatgttaacaatgtgagtcaagaccaggaggaaaaacaactcaagatggatcacactgccttctttaaaaagtttctgacctgccctaaaatcctagagtcctctgtagatcccattgatgagataagtgtgatagagtacaccagggctggaaaaccagagccctctgaaaccacaccacagggcgccagagaagggggtcaatcaaatgacggaaacatgggccacgaagcggaaatccagccggccattttgcaagttccatgtctccagggaaccattctgagtgaaaatagaatcagcagaagccaagaaggcagtatgaagcaggaggctgaacaaattcaacctgaggaggcaaaaactgccatttggcaagtcctgcaacccagcgaaggcggtgaaagaattccaagtggatgtagcataggccaaatacaagaaagcagtgatgggagcttaggggaggctgagcaaagcaaaaaggacaaagcagaattgatttcccccacttcacctctttctagttgtcttccaataatgactcacgcttctcttggggttgacacgcacaactccacaggccaaattcatgacgtccctgaaaatgacatagttgagcccagaaagcgtcagtatgtgtttcctgtttcacagaaaaggggaactattgagaatgagcgtgggaaacctttgccctcttctcctgatcttaccaggttcccttgtacttcatctcctgaaggaaatgtcacagactttttgataagccacaaaatggaggaacctaaaatagaggtgcttcaaattggggaaaccaaacccccaagctcatctagctcctcagcgaagaccttggcatttatttcaggagaacgtgagttagagaaagcccctaaattactgcaggatccatgtcaaaagggcaccctgggctgtgcgaaaaagtccagggagagagagaagtccctggaagcccgagcaggcaaatcgccagggaccctcacagcagtgacggggtcagaggaggtcaagaggaagccagaagccccaggcagtggacatttagctgagggagtaaagaagaaaattttgtccagggtggcagcactgaggctgaaactggaagaaaaggaaaatatcagaaagaactcagcctttcttaaaaagatgcccaaactcgaaacatcattatcacacacagaagagaaacaagacccaaaaaagccatcttgcaaaagagaaggaagagctccagtattactgaaaaagatccaagctgagatgttccctgaacactctggaaatgtaaaattaagctgccaatttgcagaaattcatgaagattctactatctgctggacaaaagattcaaagtccatagcccaagtgcagagaagtgcaggggacaactccactgtttcctttgccatcgtgcaagccagtccgaaggaccagggactctattactgctgcatcaagaacagctacggaaaagtgactgctgaatttaacctcacagctgaagttctcaaacagctgtcaagtcgccaggatactaaaggatgtgaagagattgaattcagccaactcatcttcaaagaagacttcctccatgacagctactttgggggccgcctgcgtggtcagatcgccacggaggagctgcactttggagaaggggttcaccgcaaagccttccgcagcacagtgatgcacggcctcatgcctgtcttcaaacctggccatgcctgtgtgcttaaggtgcacaatgccattgcctatgggaccagaaataatgatgagctcatccaaaggaactacaaactcgctgcccaggaatgctatgttcaaaatactgccaggtattatgccaagatctacgctgctgaagcacagcctctggaaggctttggagaagtacctgagatcattcctatttttcttatccatcggcctgagaacaatatcccgtatgctacagtggaggaggagctgattggagaatttgtgaagtattccatcagggatgggaaagaaataaacttcttgagaagagaatcagaagctggtcagaaatgttgcaccttccagcactgggtgtaccagaaaacaagtggctgcctcctggtgacggacatgcaaggtgtaggaatgaagctaactgacgttggcatagcaacgctggctaaagggtacaagggatttaaaggcaactgttccatgaccttcattgatcagtttaaagcactacaccagtgtaacaagtattgcaaaatgctgggactgaaatcccttcaaaacaacaaccagaaacagaagcagccgagcattgggaaaagcaaagttcaaacaaactctatgacaataaagaaggcagggcctgagaccccaggcgaaaagaaaacctaa

SEQ ID NO: 9 - DNA, 13134 bp, Homo sapiens
atggctcatgcagcctcacaattaaagaaaaacagggatttagaaatcaatgctgaagaagagcctgagaaaaaaaggaaacaccgcaaacggtcccgggatcggaagaaaaagtctgatgccaatgcaagttacttaagagcagctcgagctggacaccttgaaaaggccctcgactacataaaaaatggagttgacatcaacatttgcaatcagaatgggttgaacgctctccaccttgcttccaaagaaggccatgtagaggttgtttctgagctgctgcagagagaagccaatgtggatgcagctacaaagaaaggaaacacagcattgcacatcgcatctttggctgggcaagcagaggtggtaaaagtcttggttacaaatggagccaatgtcaatgcacaatctcagaatggtttcacgccattgtatatggcagcccaggaaaatcacctggaagttgtcaagtttcttcttgacaatggtgcaagccagagcctagccacagaggatggcttcacaccattggcagtggctttgcaacaaggtcacgaccaagtcgtttcgctcctgctagagaatgacaccaaaggaaaagtgcgtctcccagctcttcatatcgcggcccgaaaagacgacacgaaagccgccgccctgctgctgcagaatgacaacaatgcagatgtggaatcaaagagtggcttcactccgctccacatagctgctcactatggaaatatcaatgtagccacgttgctgttaaaccgagcggctgctgtggatttcaccgcaaggaatgacatcactcctttacatgttgcatcaaaaagaggaaatgcaaatatggtaaaactattgctcgatcgaggagctaaaatcgatgccaaaaccagggatggtctgacaccactgcactgtggagcaaggagtggccacgagcaggtggtagaaatgttgcttgatcgagctgcccccattctttcaaaaaccaagaatggattatctccattgcacatggccacacaaggggatcatttaaactgcgtccagcttctcctccagcataatgtacccgtggatgatgtcaccaatgactacctgactgccctacacgtggctgcccactgtggccattacaaagttgccaaggttctcttggataagaaagctaaccccaatgccaaagccctgaatggctttacccctcttcatattgcctgcaagaagaatcgaattaaagtaatggaactccttctgaaacacggtgcatccatccaagctgtaaccgagtcgggccttaccccaatccatgttgctgccttcatggggcatgtaaatattgtatcacaactaatgcatcatggagcctcaccaaacaccaccaatgtgagaggagaaacagcactgcacatggcagctcgctccggccaagctgaagttgtgcggtatctggtacaagacggagctcaggtagaagctaaagctaaggatgaccaaacaccactccacatttcagcccgactggggaaagcagacatagtacaacagctgttgcagcaaggggcatctccaaatgcagccacaacttctgggtacaccccacttcacctttccgcccgagaggggcatgaggatgtggccgcgttccttttggatcatggagcgtctttatctataacaacaaagaaaggatttactcctcttcatgtggcagcaaaatatggaaagcttgaagtcgccaatctcctgctacagaaaagtgcatctccagatgctgctgggaagagcgggctaacaccactgcatgtagctgcacattacgataatcagaaagtggcccttctgcttttggaccaaggagcctcacctcacgcagccgcaaagaatggttatacgccactgcacatcgctgccaaaaagaaccagatggacatagcgacaactctgctggaatatggtgctgatgccaacgcagttacccggcaaggaattgcttccgtccatctcgcagctcaggaagggcacgtggacatggtgtcgctgctcctcggtagaaatgcgaatgtgaacctgagcaataagagcggcctgaccccactccatttggctgctcaagaagatcgagtgaatgtggcagaagtcctcgtaaaccaaggggctcatgtggacgcccagacaaagatgggatacacaccactgcatgtgggctgccactatggaaatatcaagattgttaatttcctgctccagcattctgcaaaagttaatgccaaaacaaagaatgggtatacgccattacatcaagcagcacagcaggggcatacgcatataataaatgtcttacttcagaacaacgcctcccccaatgaactcactgtgaatgggaatactgcccttggcattgcccggcgcctcggctacatctcagtagtggacaccctgaagatagtgaccgaagagaccatgaccacaactactgtcacagagaagcacaaaatgaatgttccagaaacgatgaatgaagttcttgatatgtctgatgatgaagttcgtaaagccaatgcccctgaaatgctcagtgatggcgaatatatctcagatgttgaagaaggtgaagatgcaatgaccggggacacagacaaatatcttgggccacaggaccttaaggaattgggtgatgattccctgcctgcagagggttacatgggctttagtctcggagcgcgttctgccagcctccgctccttcagttcggataggtcttacaccttgaacagaagctcctatgcacgggacagcatgatgattgaagaactccttgtgccatccaaagagcagcatctaacattcacaagggaatttgattcagattctcttagacattacagctgggctgcagacaccttagacaatgtcaatcttgtttcaagccccattcattctgggtttctggttagctttatggtggacgcgagagggggctccatgagaggaagccgtcatcacgggatgagaatcatcattcctccacgcaagtgtacggcccccactcgaatcacctgccgtttggtaaagagacataaactggccaacccaccccccatggtggaaggagagggattagccagtaggctggtagaaatgggtcctgcaggggcacaatttttaggccctgtcatagtggaaatccctcactttgggtccatgagaggaaaagagagagaactcattgttcttcgaagtgaaaatggtgaaacttggaaggagcatcagtttgacagcaaaaatgaagatttaaccgagttacttaatggcatggatgaagaacttgatagcccagaagagttagggaaaaagcgtatctgcaggattatcacgaaagatttcccccagtattttgcagtggtttcccggattaagcaggaaagcaaccagattggtcctgaaggtggaattctgagcagcaccacagtgccccttgttcaagcatctttcccagagggtgccctaactaaaagaattcgagtgggcctccaggcccagcctgttccagatgaaattgtgaaaaagatccttggaaacaaagcaacttttagcccaattgtcactgtggaaccaagaagacggaaattccataaaccaatcacaatgaccattccggtgcccccgccctcaggagaaggtgtatccaatggatacaaaggggacactacacccaatctgcgtcttctctgtagcattacagggggcacttcgcctgctcagtgggaagacatcacaggaacaactcctttgacgtttataaaagattgtgtctcctttacaaccaatgtttcagccagattttggcttgcagactgccatcaagttttagaaactgtggggttagccacgcaactgtacagagaattgatatgtgttccatatatggccaagtttgttgtttttgccaaaatgaatgatcccgtagaatcttccttgcgatgtttctgcatgacagatgacaaagtggacaaaactttagagcaacaagagaattttgaggaagtcgcaagaagcaaagatattgaggttctggaaggaaaacctatttatgttgattgttatggaaatttggccccacttaccaaaggaggacagcaacttgtttttaacttttattctttcaaagaaaatagactgccattttccatcaagattagagacaccagccaagagccctgtggtcgtctgtcttttctgaaagaaccaaagacaacaaaaggactgcctcaaacagcggtttgcaacttaaatatcactctgccagcacataaaaaggagacagagtcagatcaagatgatgagattgagaaaacagatagacgacagagcttcgcatccttagctttacgtaagcgctacagctacttgactgagcctggaatgattgaacggagtacaggagcaacaagatccctccccaccacttactcatacaagccattcttttctacaagaccataccagtcctggacaacagctccgattacagtgcctgggccagccaagtcaggcttcacttccttatcaagttcttcctctaatacgccatcagcttctccgttaaaatcaatatggtctgtttcgacaccttctccaatcaaatccacattaggcgcgtcaactacatcttcagttaaatccattagtgacgtggcatctccaattagatcctttcggacaatgtcttcgccgataaaaactgtggtgtcacaatctccatacaatatccaagtttcctctggtaccctggctagagctccagcagtcacggaagctacgcccttaaaagggctggcatccaattctacgttttcctctcgaacctctccagtgactacagcagggtctcttttggagaggtcatcaattactatgacaccccctgcctcccccaaatcaaacattaatatgtattcctcaagtttgccatttaagtcaattattacatcagcagcaccgctaatatcttcacctttaaagtcagtggtgtctccagttaaatcagcagttgatgtcatttcatcagccaaaattacaatggcatcttctctctcatcacctgtgaagcagatgcctggacatgcagaggtagcattagtcaatggatctatttcccctctaaaatatccatcatcctcaactttaattaatggatgcaaagccactgccacgttacaggaaaaaatttcttctgctacaaactctgtgagctctgtggtcagtgcagccactgacacagttgagaaagtgttttctaccacgactgcaatgccattttccccactcaggtcatatgtttctgcagcaccatcagcttttcagtctctaagaactccttccgcaagtgcactctatacatcccttgggtcgtcaatatctgcaactacctcatctgtaacttcatcaattataacagtgccagtatactctgtagtcaatgttttgccagaaccagcattaaagaaacttccagactctaattcatttacaaaatcagcagcagccttgctgtcacccattaaaacattgactacggagacacatcctcagcctcacttcagtcgaacttcatctccagttaagtcatctttgttccttgcaccctctgcccttaagttgtctacaccatcttctttatcttccagtcaggagatactaaaagatgtagctgaaatgaaagaggacctaatgcggatgaccgcaatactacagacagatgtgcctgaggagaagccattccaacctgaactcccaaaggaagggagaatagatgatgaagaacctttcaaaattgtagagaaagtaaaggaagacttagtgaaagttagtgaaatccttaaaaaggatgtatgtgtagataataaaggatcacccaaatcaccaaagagtgacaaaggacactctcctgaagatgactggatagaatttagttcggaagaaatccgggaagccagacaacaagctgctgcgagccagtctccatctctgccagagagagtgcaagtaaaagcaaaagccgcctccgaaaaggattataacttgaccaaagttattgattacctaacaaatgatattgggagtagttcactgacaaacttaaaatacaagtttgaggatgcaaagaaggatggtgaggagagacagaaaagagttttaaaaccagcaattgctttgcaggaacacaaactcaaaatgcctccagcctccatgaggacttccacctctgagaaagaattgtgtaaaatggctgattccttttttggaacagatactattttagagtctcctgatgacttttctcaacacgaccaagataaaagtcccttgtctgacagtggctttgaaacaagaagtgaaaagacaccttcagccccacaaagcgctgaaagcactggtcctaaaccactttttcatgaagttcccatccctcctgtcattacagaaacaagaactgaagtggttcatgttatcaggagctatgatccctcagctggggatgttccccagacccaaccagaggagcctgtgtcacctaaaccttcacctacttttatggaattggaaccaaagcccaccacctctagtattaaagaaaaggttaaagcatttcaaatgaaagccagtagtgaagaagatgaccacaatcgggttttaagcaaaggcatgcgtgttaaagaagagactcacataaccacaaccaccagaatggtttatcattctccaccaggcggtgaaggtgcatctgaaagaattgaagaaaccatgtcagtccatgacatcatgaaggcctttcagtccgggcgggatccttccaaagaactggcaggtctgtttgaacataagtcggcagtgtctccagatgttcacaagtctgctgctgaaacctcagcccagcatgcagagaaggacaaccaaatgaaacccaaactggagcgtataatagaagtccacatcgaaaaaggtaaccaagctgagcccactgaagtcattattagagaaaccaaaaagcatccagaaaaagaaatgtatgtatatcagaaagacttatcccggggagatattaacctaaaagattttctgccagaaaaacacgatgcttttccttgttcagaggaacagggtcagcaagaagaagaagaacttactgctgaagagtcattgccttcttatctggagtcttccagagtaaacactcctgtgtcccaagaagaagatagccgccctagttctgctcaactcatatctgatgactcttataaaacattgaagcttttgagtcaacactcaatagaataccatgacgatgagttgtcagaactaagaggggagtcttacaggtttgctgagaaaatgcttctgtcagaaaagctagatgtgtctcattctgatactgaggaatcggttacagaccatgcaggaccccctagctcagagttacaggggtctgataagcggtccagagaaaaaatagccactgcccccaaaaaagaaattctctccaaaatctataaagatgtttctgaaaatggtgtaggtaaagtgtctaaagatgagcattttgataaagtgacagtgttgcactattctggcaatgttagtagtccaaaacatgccatgtggatgcgctttactgaggacagattagacagaggtagagagaagttgatatatgaagatagggtggacaggactgtgaaggaggctgaagaaaaactgactgaagtgtcacagttttttcgtgacaaaactgaaaagctaaatgatgaactgcagtccccagagaaaaaggcacgccctaaaaatggcaaagaatattcttctcaaagccctaccagtagcagccctgagaaagtgctactgacagaactgctggcatccaatgatgagtgggttaaggcaagacagcatggccctgatggacaaggcttccccaaggccgaggagaaggcacccagtctgcccagcagcccagagaagatggttctctcccaacagactgaggacagcaagtccacagtggaagccaaaggaagtatttcacagagcaaagcaccagatgggccccagtctggattccagctcaaacaatctaaactcagttccattagattaaaatttgaacaaggcacacacgcaaaaagtaaggacatgtctcaagaagacagaaagtcagatggccagtccagaatcccagttaaaaaaatacaggagagcaagctacccgtctaccaagtttttgctagagaaaaacagcagaaggccatagacctcccagatgaaagtgtatctgtgcaaaaagattttatggtattaaaaaccaaagatgagcatgcccaaagcaacgaaattgttgtaaatgattctggctctgataatgtgaaaaaacagagaactgaaatgtcaagtaaagcaatgcctgactctttttctgagcagcaggctaaagacttggcatgtcatataacctcagatttagcaactaggggaccatgggacaaaaaggtctttagaacatgggagagttcgggagccactaacaataagtctcagaaagaaaaactttcgcatgtacttgttcatgatgtaagagagaatcacattggtcaccctgagagtaaaagtgttgatcaaaagaatgaatttatgtctgtgactgagagagaacgcaaattgttaacaaacggctctctctcagaaattaaagaaatgactgtaaaatctccctccaaaaaagtcttatatagggaatatgttgtgaaagaaggggaccatccaggcggattgcttgatcagccttccaggaggagcgagagctcagcagtgtcacacattcccgtcagagttgctgatgagaggagaatgctgtcttctaatattcccgatggtttttgtgaacagtcggcatttccaaaacatgaactatcacaaaaattgtcccagtcaagcatgagtaaagagacagttgagacacagcactttaattctatagaagatgaaaaagttacctattcagaaatcagcaaagtttccaaacaccagagttatgtaggtttatgcccacctctcgaggaaaccgaaacctcccccaccaaatctcctgattctttagagtttagcccaggaaaggaatctccctctagtgatgtattcgaccacagtcccattgatggattggaaaaactcgcaccactagcccagacagagggagggaaagagataaaaactttacccgtttatgtcagttttgtacaagtggggaagcaatatgaaaaggagatacaacaaggaggtgtaaaaaaaatcataagtcaggaatgtaagacagtacaagaaaccagggggaccttttatacaactagacagcaaaagcaacctccttctccccaaggtagtccagaagatgatactctagagcaagtatcctttctagacagctctgggaaaagccctttaaccccagaaacacccagttcagaggaagtgagttatgaatttacatctaagacacctgactcgctcatagcttatataccaggcaaacccagcccaattcccgaggtttctgaggagtcagaggaggaggaacaggccaagtcaacctcccttaagcagactacagtggaggaaacagcagttgagcgtgaaatgcctaatgacgtgagcaaagactctaaccaaagacccaaaaataacagagttgcctatattgaatttccccctcctccaccactggatgcggaccagattgagtcagataagaagcatcattatctcccagaaaaagaggttgacatgattgaagtcaatctgcaagatgagcatgacaagtaccagctggctgaacctgtcattagagtgcagccaccttcaccagttcctcccggggcagacgtcagtgattcaagcgatgacgaatctatttatcagccagtcccagttaaaaaatataccttcaaattaaaggaagtggacgatgaacaaaaagaaaaacccaaagcttctgctgaaaaggcttccaaccagaaagaactggaaagtaatggatctggaaaagataatgaatttggccttggccttgattcacctcagaatgaaattgcccagaatgggaacaacgaccagtccatcacagagtgttccattgccaccacagcagagttttctcatgacacggatgccacagagatcgactctctggatggctatgacctgcaagatgaagatgatggcttgacagagagtgattctaaactcccaattcaagccatggaaattaagaaagatatctggaacacagagggcattctgaagccagctgaccgctcttttagccaaagtaaacttgaagttatcgaggaggagggaaaggtgggaccagatgaggacaagccaccttctaaaagttcttcatctgaaaagactcctgataagactgatcagaagtcaggggcccagttcttcacactggaaggcagacatcctgacagatcagtgtttcctgatacttacttcagttacaaagtagatgaagaatttgccactccttttaaaacagtagctaccaaaggtctagattttgacccttggtctaataaccgaggggatgatgaagtttttgacagtaaatcacgggaagatgaaactaagccatttgggctggcggtagaagaccgctctccagcaacaacccctgatacaacgccagccagaacgccaactgatgaaagtaccccaactagtgagcctaaccccttcccatttcatgaaggaaaaatgtttgagatgactcgcagtggtgcaattgacatgagcaagagggattttgttgaagagaggctccaatttttccagattggtgagcatacttctgaagggaagtcaggggaccagggggaaggggataaaagtatggtcactgccacaccacagccacagtcaggggacaccactgtagaaaccaatctagagagaaatgtagagacacctacagtggaacctaaccccagcatcccgaccagcggagagtgtcaggaaggcacatccagtagtggctccctggagaaatcagcagcagccactaacacctctaaagttgaccccaagttgcgcacgcctataaaaatgggaatttctgcatccaccatgaccatgaagaaagaaggccctggagaaataacagataagatagaagcggtgatgaccagttgtcagggattagaaaatgaaactataacaatgatttcaaatacagccaatagccagatgggcgttaggccccatgaaaaacatgattttcaaaaagataactttaataacaacaacaatttggattcttccactatacagacagataacattatgagtaatatagttctgacagaacattctgcacccacttgtaccacagagaaagataacccagtgaaagtctcatcaggaaaaaagacaggggtactacaaggacactgtgtaagagataagcagaaagttcttggagaacagcaaaaaacaaaggaattgatagggattaggcaaaaatccaaacttcccataaaggccacttcaccaaaagataccttcccaccgaaccatatgtcaaacactaaagcaagtaaaatgaagcaggttagtcaatccgagaaaaccaaagcccttactacttcttcatgtgtagatgtaaagtccagaattccagtgaaaaacacacacagggataacataattgcagttagaaaagcatgtgccacacaaaagcaagggcagccagagaaaggcaaggccaaacagcttccatccaagttgccagtaaaggtaagatccacctgtgtcactaccaccaccaccactgccaccaccaccaccactaccaccactaccaccaccaccagctgcacagttaaagttaggaaaagtcagctcaaggaagtatgtaaacattccattgaatattttaagggaattagtggtgagaccttaaagcttgtggaccgcctctctgaagaagaaaaaaagatgcagtccgagttgtccgatgaggaagaaagtacctcaagaaacacgtcgttgtccgagacttcccggggtggccagccttcggttacaacgaagtctgctagagataagaaaacagaggcagcacctttaaaatcaaagagtgaaaaggccggcagtgagaaaaggagcagtagaaggactggtccacagagtccatgtgaacggacagatatcaggatggcaatagtagccgatcacctgggacttagttggacagaactggcaagggaactgaatttttcagtggatgaaatcaatcaaatacgtgtggaaaatccaaattctttaatttctcagagcttcatgttattaaaaaaatgggttaccagagacggaaaaaatgccacaactgatgccttaacttcggtcttgacaaaaattaatcgaatagatatagtgacactgctagaaggaccaatatttgattatggaaatatttcaggcaccagaagttttgcagatgagaacaatgttttccatgaccctgttgatggttggcagaatgagacatcaagtggaaacctagagtcctgcgctcaagctcgaagagtaactggtgggttactagatcgactggatgacagccctgaccagtgtagagattccattacctcatatctcaaaggagaagctggcaaatttgaagcaaatggaagccatacagaaatcactccagaagcaaagacaaaatcttactttccagaatcccaaaatgatgtaggaaaacagagtaccaaggaaactctgaaaccaaaaatacatggatctggtcatgttgaagaaccagcatcaccactagcagcatatcagaaatctctagaagaaaccagcaagcttataatagaagagactaaaccctgtgtgcctgtcagtatgaaaaagatgagtaggacttctccagcagatggcaagccaaggcttagcctccatgaagaagaggggtccagtgggtctgagcaaaagcagggagaaggttttaaggtgaaaacgaagaaagaaatccggcatgtggaaaagaagagccactcgtaa

SEQ ID NO: 10 - DNA, 8532 bp, Homo sapiens
atggctgcagcttcatatgatcagttgttaaagcaagttgaggcactgaagatggagaactcaaatcttcgacaagagctagaagataattccaatcatcttacaaaactggaaactgaggcatctaatatgaaggaagtacttaaacaactacaaggaagtattgaagatgaagctatggcttcttctggacagattgatttattagagcgtcttaaagagcttaacttagatagcagtaatttccctggagtaaaactgcggtcaaaaatgtccctccgttcttatggaagccgggaaggatctgtatcaagccgttctggagagtgcagtcctgttcctatgggttcatttccaagaagagggtttgtaaatggaagcagagaaagtactggatatttagaagaacttgagaaagagaggtcattgcttcttgctgatcttgacaaagaagaaaaggaaaaagactggtattacgctcaacttcagaatctcactaaaagaatagatagtcttcctttaactgaaaatttttccttacaaacagatatgaccagaaggcaattggaatatgaagcaaggcaaatcagagttgcgatggaagaacaactaggtacctgccaggatatggaaaaacgagcacagcgaagaatagccagaattcagcaaatcgaaaaggacatacttcgtatacgacagcttttacagtcccaagcaacagaagcagagaggtcatctcagaacaagcatgaaaccggctcacatgatgctgagcggcagaatgaaggtcaaggagtgggagaaatcaacatggcaacttctggtaatggtcagggttcaactacacgaatggaccatgaaacagccagtgttttgagttctagtagcacacactctgcacctcgaaggctgacaagtcatctgggaaccaaggtggaaatggtgtattcattgttgtcaatgcttggtactcatgataaggatgatatgtcgcgaactttgctagctatgtctagctcccaagacagctgtatatccatgcgacagtctggatgtcttcctctcctcatccagcttttacatggcaatgacaaagactctgtattgttgggaaattcccggggcagtaaagaggctcgggccagggccagtgcagcactccacaacatcattcactcacagcctgatgacaagagaggcaggcgtgaaatccgagtccttcatcttttggaacagatacgcgcttactgtgaaacctgttgggagtggcaggaagctcatgaaccaggcatggaccaggacaaaaatccaatgccagctcctgttgaacatcagatctgtcctgctgtgtgtgttctaatgaaactttcatttgatgaagagcatagacatgcaatgaatgaactagggggactacaggccattgcagaattattgcaagtggactgtgaaatgtatgggcttactaatgaccactacagtattacactaagacgatatgctggaatggctttgacaaacttgacttttggagatgtagccaacaaggctacgctatgctctatgaaaggctgcatgagagcacttgtggcccaactaaaatctgaaagtgaagacttacagcaggttattgcgagtgttttgaggaatttgtcttggcgagcagatgtaaatagtaaaaagacgttgcgagaagttggaagtgtgaaagcattgatggaatgtgctttagaagttaaaaaggaatcaaccctcaaaagcgtattgagtgccttatggaatttgtcagcacattgcactgagaataaagctgatatatgtgctgtagatggtgcacttgcatttttggttggcactcttacttaccggagccagacaaacactttagccattattgaaagtggaggtgggatattacggaatgtgtccagcttgatagctacaaatgaggaccacaggcaaatcctaagagagaacaactgtctacaaactttattacaacacttaaaatctcatagtttgacaatagtcagtaatgcatgtggaactttgtggaatctctcagcaagaaatcctaaagaccaggaagcattatgggacatgggggcagttagcatgctcaagaacctcattcattcaaagcacaaaatgattgctatgggaagtgctgcagctttaaggaatctcatggcaaataggcctgcgaagtacaaggatgccaatattatgtctcctggctcaagcttgccatctcttcatgttaggaaacaaaaagccctagaagcagaattagatgctcagcacttatcagaaacttttgacaatatagacaatttaagtcccaaggcatctcatcgtagtaagcagagacacaagcaaagtctctatggtgattatgtttttgacaccaatcgacatgatgataataggtcagacaattttaatactggcaacatgactgtcctttcaccatatttgaatactacagtgttacccagctcctcttcatcaagaggaagcttagatagttctcgttctgaaaaagatagaagtttggagagagaacgcggaattggtctaggcaactaccatccagcaacagaaaatccaggaacttcttcaaagcgaggtttgcagatctccaccactgcagcccagattgccaaagtcatggaagaagtgtcagccattcatacctctcaggaagacagaagttctgggtctaccactgaattacattgtgtgacagatgagagaaatgcacttagaagaagctctgctgcccatacacattcaaacacttacaatttcactaagtcggaaaattcaaataggacatgttctatgccttatgccaaattagaatacaagagatcttcaaatgatagtttaaatagtgtcagtagtagtgatggttatggtaaaagaggtcaaatgaaaccctcgattgaatcctattctgaagatgatgaaagtaagttttgcagttatggtcaatacccagccgacctagcccataaaatacatagtgcaaatcatatggatgataatgatggagaactagatacaccaataaattatagtcttaaatattcagatgagcagttgaactctggaaggcaaagtccttcacagaatgaaagatgggcaagacccaaacacataatagaagatgaaataaaacaaagtgagcaaagacaatcaaggaatcaaagtacaacttatcctgtttatactgagagcactgatgataaacacctcaagttccaaccacattttggacagcaggaatgtgtttctccatacaggtcacggggagccaatggttcagaaacaaatcgagtgggttctaatcatggaattaatcaaaatgtaagccagtctttgtgtcaagaagatgactatgaagatgataagcctaccaattatagtgaacgttactctgaagaagaacagcatgaagaagaagagagaccaacaaattatagcataaaatataatgaagagaaacgtcatgtggatcagcctattgattatagtttaaaatatgccacagatattccttcatcacagaaacagtcattttcattctcaaagagttcatctggacaaagcagtaaaaccgaacatatgtcttcaagcagtgagaatacgtccacaccttcatctaatgccaagaggcagaatcagctccatccaagttctgcacagagtagaagtggtcagcctcaaaaggctgccacttgcaaagtttcttctattaaccaagaaacaatacagacttattgtgtagaagatactccaatatgtttttcaagatgtagttcattatcatctttgtcatcagctgaagatgaaataggatgtaatcagacgacacaggaagcagattctgctaataccctgcaaatagcagaaataaaagaaaagattggaactaggtcagctgaagatcctgtgagcgaagttccagcagtgtcacagcaccctagaaccaaatccagcagactgcagggttctagtttatcttcagaatcagccaggcacaaagctgttgaattttcttcaggagcgaaatctccctccaaaagtggtgctcagacacccaaaagtccacctgaacactatgttcaggagaccccactcatgtttagcagatgtacttctgtcagttcacttgatagttttgagagtcgttcgattgccagctccgttcagagtgaaccatgcagtggaatggtaagtggcattataagccccagtgatcttccagatagccctggacaaaccatgccaccaagcagaagtaaaacacctccaccacctcctcaaacagctcaaaccaagcgagaagtacctaaaaataaagcacctactgctgaaaagagagagagtggacctaagcaagctgcagtaaatgctgcagttcagagggtccaggttcttccagatgctgatactttattacattttgccacggaaagtactccagatggattttcttgttcatccagcctgagtgctctgagcctcgatgagccatttatacagaaagatgtggaattaagaataatgcctccagttcaggaaaatgacaatgggaatgaaacagaatcagagcagcctaaagaatcaaatgaaaaccaagagaaagaggcagaaaaaactattgattctgaaaaggacctattagatgattcagatgatgatgatattgaaatactagaagaatgtattatttctgccatgccaacaaagtcatcacgtaaagcaaaaaagccagcccagactgcttcaaaattacctccacctgtggcaaggaaaccaagtcagctgcctgtgtacaaacttctaccatcacaaaacaggttgcaaccccaaaagcatgttagttttacaccgggggatgatatgccacgggtgtattgtgttgaagggacacctataaacttttccacagctacatctctaagtgatctaacaatcgaatcccctccaaatgagttagctgctggagaaggagttagaggaggggcacagtcaggtgaatttgaaaaacgagataccattcctacagaaggcagaagtacagatgaggctcaaggaggaaaaacctcatctgtaaccatacctgaattggatgacaataaagcagaggaaggtgatattcttgcagaatgcattaattctgctatgcccaaagggaaaagtcacaagcctttccgtgtgaaaaagataatggaccaggtccagcaagcatctgcgtcttcttctgcacccaacaaaaatcagttagatggtaagaaaaagaaaccaacttcaccagtaaaacctataccacaaaatactgaatataggacacgtgtaagaaaaaatgcagactcaaaaaataatttaaatgctgagagagttttctcagacaacaaagattcaaagaaacagaatttgaaaaataattccaaggtcttcaatgataagctcccaaataatgaagatagagtcagaggaagttttgcttttgattcacctcatcattacacgcctattgaaggaactccttactgtttttcacgaaatgattctttgagttctctagattttgatgatgatgatgttgacctttccagggaaaaggctgaattaagaaaggcaaaagaaaataaggaatcagaggctaaagttaccagccacacagaactaacctccaaccaacaatcagctaataagacacaagctattgcaaagcagccaataaatcgaggtcagcctaaacccatacttcagaaacaatccacttttccccagtcatccaaagacataccagacagaggggcagcaactgatgaaaagttacagaattttgctattgaaaatactccggtttgcttttctcataattcctctctgagttctctcagtgacattgaccaagaaaacaacaataaagaaaatgaacctatcaaagagactgagccccctgactcacagggagaaccaagtaaacctcaagcatcaggctatgctcctaaatcatttcatgttgaagataccccagtttgtttctcaagaaacagttctctcagttctcttagtattgactctgaagatgacctgttgcaggaatgtataagctccgcaatgccaaaaaagaaaaagccttcaagactcaagggtgataatgaaaaacatagtcccagaaatatgggtggcatattaggtgaagatctgacacttgatttgaaagatatacagagaccagattcagaacatggtctatcccctgattcagaaaattttgattggaaagctattcaggaaggtgcaaattccatagtaagtagtttacatcaagctgctgctgctgcatgtttatctagacaagcttcgtctgattcagattccatcctttccctgaaatcaggaatctctctgggatcaccatttcatcttacacctgatcaagaagaaaaaccctttacaagtaataaaggcccacgaattctaaaaccaggggagaaaagtacattggaaactaaaaagatagaatctgaaagtaaaggaatcaaaggaggaaaaaaagtttataaaagtttgattactggaaaagttcgatctaattcagaaatttcaggccaaatgaaacagccccttcaagcaaacatgccttcaatctctcgaggcaggacaatgattcatattccaggagttcgaaatagctcctcaagtacaagtcctgtttctaaaaaaggcccaccccttaagactccagcctccaaaagccctagtgaaggtcaaacagccaccacttctcctagaggagccaagccatctgtgaaatcagaattaagccctgttgccaggcagacatcccaaataggtgggtcaagtaaagcaccttctagatcaggatctagagattcgaccccttcaagacctgcccagcaaccattaagtagacctatacagtctcctggccgaaactcaatttcccctggtagaaatggaataagtcctcctaacaaattatctcaacttccaaggacatcatcccctagtactgcttcaactaagtcctcaggttctggaaaaatgtcatatacatctccaggtagacagatgagccaacagaaccttaccaaacaaacaggtttatccaagaatgccagtagtattccaagaagtgagtctgcctccaaaggactaaatcagatgaataatggtaatggagccaataaaaaggtagaactttctagaatgtcttcaactaaatcaagtggaagtgaatctgatagatcagaaagacctgtattagtacgccagtcaactttcatcaaagaagctccaagcccaaccttaagaagaaaattggaggaatctgcttcatttgaatctctttctccatcatctagaccagcttctcccactaggtcccaggcacaaactccagttttaagtccttcccttcctgatatgtctctatccacacattcgtctgttcaggctggtggatggcgaaaactcccacctaatctcagtcccactatagagtataatgatggaagaccagcaaagcgccatgatattgcacggtctcattctgaaagtccttctagacttccaatcaataggtcaggaacctggaaacgtgagcacagcaaacattcatcatcccttcctcgagtaagcacttggagaagaactggaagttcatcttcaattctttctgcttcatcagaatccagtgaaaaagcaaaaagtgaggatgaaaaacatgtgaactctatttcaggaaccaaacaaagtaaagaaaaccaagtatccgcaaaaggaacatggagaaaaataaaagaaaatgaattttctcccacaaatagtacttctcagaccgtttcctcaggtgctacaaatggtgctgaatcaaagactctaatttatcaaatggcacctgctgtttctaaaacagaggatgtttgggtgagaattgaggactgtcccattaacaatcctagatctggaagatctcccacaggtaatactcccccggtgattgacagtgtttcagaaaaggcaaatccaaacattaaagattcaaaagataatcaggcaaaacaaaatgtgggtaatggcagtgttcccatgcgtaccgtgggtttggaaaatcgcctgaactcctttattcaggtggatgcccctgaccaaaaaggaactgagataaaaccaggacaaaataatcctgtccctgtatcagagactaatgaaagttctatagtggaacgtaccccattcagttctagcagctcaagcaaacacagttcacctagtgggactgttgctgccagagtgactccttttaattacaacccaagccctaggaaaagcagcgcagatagcacttcagctcggccatctcagatcccaactccagtgaataacaacacaaagaagcgagattccaaaactgacagcacagaatccagtggaacccaaagtcctaagcgccattctgggtcttaccttgtgacatctgtttaa

SEQ ID NO: 11 - DNA, 4500 bp, Homo sapiens
atgatgatggcaagaaagcaagatgtccgaattcccacctacaacatcagtgtggtgggattatctgggaccgagaaggaaaagggccagtgtgggattggaaagtcttgtttgtgcaaccgcttcgtgcgcccgagtgctgacgagtttcacttggaccatacctccgtcctcagcaccagtgactttggagggcgagtggtcaataatgaccactttctctactggggagaagttagccgctccctggaggattgtgtggaatgtaagatgcacattgtggagcagactgaatttattgatgatcagacttttcaacctcatcgaagcacggccctgcagccctatatcaagagagctgctgcgaccaagcttgcatcagctgaaaaactcatgtacttttgcactgaccagctggggctggagcaggactttgagcagaaacaaatgccagacggaaagctgctggttgatggttttcttcttggtattgatgttagcaggggcatgaataggaactttgatgaccagctcaagtttgtctccaatctctacaatcagcttgcaaaaacaaaaaagcccatagtggtggtcctgactaagtgtgacgaaggtgttgagcggtacattagagatgcacatacttttgccttaagcaaaaagaacctccaggttgtggagacctcagcgagatccaatgtaaacgtggacttggctttcagcaccttagtgcaactcattgataaaagtcggggaaagacaaaaatcattccttattttgaagctctcaagcagcagagtcagcagatagctacagcaaaagacaagtatgagtggctggtgagtcgcattgtgaaaaaccacaatgagaactggctgagtgtcagccgaaagatgcaggcctctccagaataccaggactatgtctacctggaagggactcagaaagccaagaagctgtttctacagcacatccaccgcctcaagcatgagcatatcgagcgtaggagaaagctgtacctggcagccctgccattagcttttgaagctcttatacctaatctagatgaaatagaccacctaagctgcataaaagccaaaaagctcttagaaaccaagccagaattcttgaagtggtttgttgtgcttgaagagaccccatgggatgccaccagtcacattgacaacatggaaaacgaacggattccctttgatttaatggataccgtccctgcagagcagctatacgaggcccacttagagaagctgaggaacgaaaggaaaagagttgagatgcgaagggcgtttaaagaaaacctggagacttctcctttcataactcccggaaagccttgggaagaggcccgtagttttattatgaatgaggatttctaccagtggctggaggaatctgtatacatggatatttatggcaaacaccaaaagcaaattatagataaagcaaaggaagaatttcaggagttgcttttggaatattcagaattgttttatgaactggagctggatgctaagcccagcaaggagaagatgggtgttattcaggatgttctgggagaggaacagcgatttaaagcattacaaaagctccaagcagagcgtgatgcccttattctgaaacacattcattttgtgtaccacccaacaaaggagacatgccccagctgcccagcttgtgtggacgctaagattgagcacttgattagttctcggtttatccggccgtctgaccggaatcagaaaaattcactctctgaccctaacattgatagaatcaacttggttatattgggcaaagacggccttgcccgagagttggccaatgagattcgagctctttgtacaaatgatgacaagtatgtgatagatggtaaaatgtatgagctttccctgaggccaatagaggggaatgtcaggcttcctgtgaactctttccagacgccaacatttcagccccacggctgtctctgcctttacaattcaaaggaatcgctatcctatgtagtggaaagtatagagaagagtagagagtccacgctgggccggcgggataatcatttagtccatctcccccttacattaattttggttaacaagagaggagacaccagtggagagactctgcatagcttaatacagcaaggtcaacaaattgctagcaaacttcagtgtgtctttctcgaccctgcttctgctggcattggttacggacgcaacattaatgaaaagcaaatcagtcaagttttgaagggactcctggactctaagcgtaacttaaacctggtcagttctactgctagcatcaaagatttggctgatgttgatctgcgaattgttatgtgtctgatgtgtggagatccttttagtgcagatgacatactttttcctgtccttcagtcccaaacctgtaaatcttcccattgtggaagcaacaactctgttttacttgaactaccaatcggactgcacaagaagcggattgaactgtctgttctttcataccattcctcctttagcatcagaaagagccggttggttcatgggtacattgttttttattcagccaaacgtaaggcctctttggctatgttacgtgcctttctttgtgaagtgcaggatattatccctattcagcttgtagcactcactgatggcgctgtagatgtcctggacaatgacttaagtagggaacagctaactgagggggaggagattgctcaagaaattgacggaaggttcacaagcatcccctgtagccaaccccagcataaacttgagatctttcacccattttttaaagatgtggtggaaaaaaagaacataatcgaggctactcatatgtacgataatgctgccgaggcctgtagcaccaccgaagaggtgtttaactccccccgggcaggatcaccgctctgcaactcaaacctgcaggattcagaagaagatatcgagccatcttacagcctgtttcgagaagacacatcactgccttctctgtccaaagaccattctaagctctctatggaactggagggaaatgatgggctgtctttcattatgagcaattttgagagtaaactgaacaacaaagtacctccgccagtcaaaccaaagcctcctgtccattttgaaattacaaagggggatctatcttatttagaccaaggccatagggatggacagaggaagtctgtgtcttctagcccctggctgcctcaggatgggtttgatccttctgactatgctgaacccatggatgctgtggtgaagccaaggaatgaagaagaaaacatatactccgtgccccatgacagcacccaaggcaaaatcatcaccattcggaatatcaacaaagcccagtccaacggcagcgggaatggttctgacagtgaaatggacaccagctctctagagcgagggcgcaaggtttccatcgtgagcaagccagtgctgtacaggacgagatgcacccggctggggcggtttgctagttaccggaccagcttcagcgtggggagtgatgatgagctggggcccatccggaagaaagaggaggatcaggcatcccagggttataaaggggacaatgctgtcattccatacgaaacagacgaagacccgcggaggaggaatattcttcgcagcctaaggaggaacactaagaaaccaaagcccaaaccccggccatccatcacaaaggcaacctgggagagtaactattttggggtgcccttaacaactgtcgtgactccagagaagccgatccccatttttattgaaagatgtattgagtacattgaagccacaggactgagcacggaaggcatctaccgggtcagcgggaacaagtctgagatggagagtctgcagagacagtttgatcaagaccacaacctggacctggcagagaaagactttacggtgaataccgtggctggtgccatgaagagctttttctcagaactgcctgaccccctggtcccgtataacatgcagatcgacttggtggaagcacacaaaatcaacgaccgggagcagaagttgcatgcccttaaggaggtattaaagaaatttccaaaggaaaaccacgaagtcttcaagtatgtcatctctcacctaaacaaggtcagccacaacaacaaggtgaatctcatgaccagcgagaacctctccatctgcttctggcccaccttgatgagacctgatttcagcactatggacgccctcacagccacgcgcacctaccagacaatcattgaactctttatccagcagtgccccttcttcttctacaatcggcccatcaccgagccccccggcgccaggcccagctccccctctgccgtggcttccaccgtccccttcctcacttccacgcctgtcacaagtcagccgtcgcccccacagtcgcctccacccaccccccagtccccaatgcagccactgcttccctcccagcttcaagccgaacacacgctgtga

SEQ ID NO: 12 - DNA, 6858 bp, Homo sapiens
atggccgcgcaggtcgcccccgccgccgccagcagcctgggcaacccgccgccgccgccgccctcggagctgaagaaagccgagcagcagcagcgggaggaggcggggggcgaggcggcggcggcggcagcggccgagcgcggggaaatgaaggcagccgccgggcaggaaagcgagggccccgccgtggggccgccgcagccgctgggaaaggagctgcaggacggggccgagagcaatgggggtggcggcggcggcggagccggcagcggcggcgggcccggcgcggagccggacctgaagaactcgaacgggaacgcgggccctaggcccgccctgaacaataacctcacggagccgcccggcggcggcggtggcggcagcagcgatggggtgggggcgcctcctcactcagccgcggccgccttgccgcccccagcctacggcttcgggcaaccctacggccggagcccgtctgccgtcgccgccgccgcggccgccgtcttccaccaacaacatggcggacaacaaagccctggcctggcagcgctgcagagcggcggcggcgggggcctggagccctacgcggggccccagcagaactctcacgaccacggcttccccaaccaccagtacaactcctactaccccaaccgcagcgcctaccccccgcccgccccggcctacgcgctgagctccccgagaggtggcactccgggctccggcgcggcggcggctgccggctccaagccgcctccctcctccagcgcctccgcctcctcgtcgtcttcgtccttcgctcagcagcgcttcggggccatggggggaggcggcccctccgcggccggcgggggaactccccagcccaccgccacccccaccctcaaccaactgctcacgtcgcccagctcggcccggggctaccagggctaccccgggggcgactacagtggcgggccccaggacgggggcgccggcaagggcccggcggacatggcctcgcagtgttggggggctgcggcggcggcagctgcggcggcggccgcctcgggaggggcccaacaaaggagccaccacgcgcccatgagccccgggagcagcggcggcggggggcagccgctcgcccggacccctcagccatccagtccaatggatcagatgggcaagatgagacctcagccatatggcgggactaacccatactcgcagcaacagggacctccgtcaggaccgcagcaaggacatgggtacccagggcagccatacgggtcccagaccccgcagcggtacccgatgaccatgcagggccgggcgcagagtgccatgggcggcctctcttatacacagcagattcctccttatggacaacaaggccccagcgggtatggtcaacagggccagactccatattacaaccagcaaagtcctcaccctcagcagcagcagccaccctactcccagcaaccaccgtcccagacccctcatgcccaaccttcgtatcagcagcagccacagtctcaaccaccacagctccagtcctctcagcctccatactcccagcagccatcccagcctccacatcagcagtccccggctccatacccctcccagcagtcgacgacacagcagcacccccagagccagcccccctactcacagccacaggctcagtctccttaccagcagcagcaacctcagcagccagcaccctcgacgctctcccagcaggctgcgtatcctcagccccagtctcagcagtcccagcaaactgcctattcccagcagcgcttccctccaccgcaggagctatctcaagattcatttgggtctcaggcatcctcagccccctcaatgacctccagtaagggagggcaagaagatatgaacctgagccttcagtcaagaccctccagcttgcctgatctatctggttcaatagatgacctccccatggggacagaaggagctctgagtcctggagtgagcacatcagggatttccagcagccaaggagagcagagtaatccagctcagtctcctttctctcctcatacctcccctcacctgcctggcatccgaggcccttccccgtcccctgttggctctcccgccagtgttgctcagtctcgctcaggaccactctcgcctgctgcagtgccaggcaaccagatgccacctcggccacccagtggccagtcggacagcatcatgcatccttccatgaaccaatcaagcattgcccaagatcgaggttatatgcagaggaacccccagatgccccagtacagttccccccagcccggctcagccttatctccgcgtcagccttccggaggacagatacacacaggcatgggctcctaccagcagaactccatggggagctatggtccccaggggggtcagtatggcccacaaggtggctaccccaggcagccaaactataatgccttgcccaatgccaactaccccagtgcaggcatggctggaggcataaaccccatgggtgccggaggtcaaatgcatggacagcctggcatcccaccttatggcacactccctccagggaggatgagtcacgcctccatgggcaaccggccttatggccctaacatggccaatatgccacctcaggttgggtcagggatgtgtcccccaccagggggcatgaaccggaaaacccaagaaactgctgtcgccatgcatgttgctgccaactctatccaaaacaggccgccaggctaccccaatatgaatcaagggggcatgatgggaactggacctccttatggacaagggattaatagtatggctggcatgatcaaccctcagggacccccatattccatgggtggaaccatggccaacaattctgcagggatggcagccagcccagagatgatgggccttggggatgtaaagttaactccagccaccaaaatgaacaacaaggcagatgggacacccaagacagaatccaaatccaagaaatccagttcttctactacaaccaatgagaagatcaccaagttgtatgagctgggtggtgagcctgagaggaagatgtgggtggaccgttatctggccttcactgaggagaaggccatgggcatgacaaatctgcctgctgtgggtaggaaacctctggacctctatcgcctctatgtgtctgtgaaggagattggtggattgactcaggtcaacaagaacaaaaaatggcgggaacttgcaaccaacctcaatgtgggcacatcaagcagtgctgccagctccttgaaaaagcagtatatccagtgtctctatgcctttgaatgcaagattgaacggggagaagaccctcccccagacatctttgcagctgctgattccaagaagtcccagcccaagatccagcctccctctcctgcgggatcaggatctatgcaggggccccagactccccagtcaaccagcagttccatggcagaaggaggagacttaaagccaccaactccagcatccacaccacacagtcagatccccccattgccaggcatgagcaggagcaattcagttgggatccaggatgcctttaatgatggaagtgactccacattccagaagcggaattccatgactccaaaccctgggtatcagcccagtatgaatacctctgacatgatggggcgcatgtcctatgagccaaataaggatccttatggcagcatgaggaaagctccagggagtgatcccttcatgtcctcagggcagggccccaacggcgggatgggtgacccctacagtcgtgctgccggccctgggctaggaaatgtggcgatgggaccacgacagcactatccctatggaggtccttatgacagagtgaggacggagcctggaatagggcctgagggaaacatgagcactggggccccacagccgaatctcatgccttccaacccagactcggggatgtattctcctagccgctaccccccgcagcagcagcagcagcagcagcaacgacatgattcctatggcaatcagttctccacccaaggcaccccttctggcagccccttccccagccagcagactacaatgtatcaacagcaacagcagaattacaagcggccaatggatggcacatatggccctcctgccaagcggcacgaaggggagatgtacagcgtgccatacagcactgggcaggggcagcctcagcagcagcagttgcccccagcccagccccagcctgccagccagcaacaagctgcccagccttcccctcagcaagatgtatacaaccagtatggcaatgcctatcctgccactgccacagctgctactgagcgccgaccagcaggcggcccccagaaccaatttccattccagtttggccgagaccgtgtctctgcaccccctggcaccaatgcccagcaaaacatgccaccacaaatgatgggcggccccatacaggcatcagctgaggttgctcagcaaggcaccatgtggcaggggcgtaatgacatgacctataattatgccaacaggcagagcacgggctctgccccccagggccccgcctatcatggcgtgaaccgaacagatgaaatgctgcacacagatcagagggccaaccacgaaggctcgtggccttcccatggcacacgccagcccccatatggtccctctgcccctgtgccccccatgacaaggccccctccatctaactaccagcccccaccaagcatgcagaatcacattcctcaggtatccagccctgctcccctgccccggccaatggagaaccgcacctctcctagcaagtctccattcctgcactctgggatgaaaatgcagaaggcaggtcccccagtacctgcctcgcacatagcacctgcccctgtgcagccccccatgattcggcgggatatcaccttcccacctggctctgttgaagccacacagcctgtgttgaagcagaggaggcggctcacaatgaaagacattggaaccccggaggcatggcgggtaatgatgtccctcaagtctggtctcctggcagagagcacatgggcattagataccatcaacatcctgctgtatgatgacaacagcatcatgaccttcaacctcagtcagctcccagggttgctagagctccttgtagaatatttccgacgatgcctgattgagatctttggcattttaaaggagtatgaggtgggtgacccaggacagagaacgctactggatcctgggaggttcagcaaggtgtctagtccagctcccatggagggtggggaagaagaagaagaacttctaggtcctaaactagaagaggaagaagaagaggaagtagttgaaaatgatgaggagatagccttttcaggcaaggacaagccagcttcagagaatagtgaggagaagctgatcagtaagtttgacaagcttccagtaaagatcgtacagaagaatgatccatttgtggtggactgctcagataagcttgggcgtgtgcaggagtttgacagtggcctgctgcactggcggattggtgggggggacaccactgagcatatccagacccacttcgagagcaagacagagctgctgccttcccggcctcacgcaccctgcccaccagcccctcggaagcatgtgacaacagcagagggtacaccagggacaacagaccaggaggggcccccacctgatggacctccagaaaaacggatcacagccactatggatgacatgttgtctactcggtctagcaccttgaccgaggatggagctaagagttcagaggccatcaaggagagcagcaagtttccatttggcattagcccagcacagagccaccggaacatcaagatcctagaggacgaaccccacagtaaggatgagaccccactgtgtacccttctggactggcaggattctcttgccaagcgctgcgtctgtgtgtccaataccattcgaagcctgtcatttgtgccaggcaatgactttgagatgtccaaacacccagggctgctgctcatcctgggcaagctgatcctgctgcaccacaagcacccagaacggaagcaggcaccactaacttatgaaaaggaggaggaacaggaccaaggggtgagctgcaacaaagtggagtggtggtgggactgcttggagatgctccgggaaaacaccttggttacactcgccaacatctcggggcagttggacctatctccataccccgagagcatttgcctgcctgtcctggacggactcctacactgggcagtttgcccttcagctgaagcccaggaccccttttccaccctgggccccaatgccgtcctttccccgcagagactggtcttggaaaccctcagcaaactcagcatccaggacaacaatgtggacctgattctggccacaccccccttcagccgcctggagaagttgtatagcactatggtgcgcttcctcagtgaccgaaagaacccggtgtgccgggagatggctgtggtactgctggccaacctggctcagggggacagcctggcagctcgtgccattgcagtgcagaagggcagtatcggcaacctcctgggcttcctagaggacagccttgccgccacacagttccagcagagccaggccagcctcctccacatgcagaacccaccctttgagccaactagtgtggacatgatgcggcgggctgcccgcgcgctgcttgccttggccaaggtggacgagaaccactcagagtttactctgtacgaatcacggctgttggacatctcggtatcaccgttgatgaactcattggtttcacaagtcatttgtgatgtactgtttttgattggccagtcatga

SEQ ID NO: 13 - DNA, 5508 bp, Homo sapiens
atggcaaactcgacggggaaggcgcctccggacgagcggagaaagggactcgctttcctggacgagctgcggcagttccaccacagcagagggtcgccttttaaaaaaatccctgcggtgggtgggaaggagctggatcttcacggtctctacaccagagtcactactttaggcggattcgcgaaggtttctgagaagaatcagtggggagaaattgttgaagagttcaactttcccagaagttgttctaacgctgcctttgctttaaaacagtattacttgcgttacctagaaaagtacgagaaagttcatcattttggggaggatgatgatgaggtaccaccaggcaatccaaagccacagcttcctattggtgcaattccatcttcctacaattaccagcaacacagtgtgtcggattatctgcgtcaaagttatgggctgtccatggactttaattcgccaaatgattataataaattggtgctttcactgttatctggactcccaaatgaagtggactttgctattaacgtatgcactctcctatcaaatgaaagcaagcacgtcatgcaacttgaaaaagatcctaaaatcatcactttactacttgctaatgccggggtgtttgacgacactttaggatccttttccactgtatttggagaagaatggaaagagaagactgatagagacttcgttaagttttggaaagacatcgttgatgataatgaagttcgtgacctcatttctgacagaaacaagtctcatgaaggtacatcaggagaatggatttgggagtctttatttcatccacctcgaaagctgggcattaacgatattgaaggacagcgggtacttcagattgcagtgattttgagaaatctttcctttgaggagggcaatgttaagctcttggcagctaatcgtacctgtcttcgtttcctattactttctgcacatagtcattttatttctttaaggcaattaggccttgacacattaggaaatattgcagctgagcttttactggaccctgttgatttcaaaactactcatctgatgtttcatactgttacaaaatgtctaatgtcaagggatagatttttaaagatgagaggcatggaaattttgggaaatctttgcaaagcagaagataatggtgttttaatttgtgaatatgtggatcaggattcctacagagagatcatttgtcatctcactttacctgatgtgctgcttgtaatctcaacactcgaggtgctatacatgctcacggaaatgggagatgttgcttgcacaaaaattgcaaaagtagaaaagagcatagacatgttagtgtgtctggtttctatggatattcagatgtttggccctgatgcactagctgcggtaaaactcattgaacacccaagttccagtcatcaaatgttatctgaaattaggccacaagctatagagcaagtccaaacccagactcatgtagcatctgccccagcttccagagcagttgtagcgcagcatgttgctccacctccaggaatagtggaaatagatagtgagaagtttgcttgtcagtggctaaatgctcattttgaagtaaatccagattgttctgtttctcgagcagaaatgtattctgaatacctctcgacttgcagtaaattagctcgtggtggaatcctaacatcaactggattttataaatgtcttagaacggtctttccaaatcatacagtgaagagagtggaggattccagtagcaatgggcaggcacatattcatgtggtaggagtaaaacggagggctataccacttcccattcagatgtactatcagcagcaaccagtttctacttctgttgttcgtgttgattctgttcctgatgtatctcctgctccttcacctgcaggaatccctcatggatcacaaaccataggaaaccattttcagaggactcctgttgccaaccaatcttcaaatctgactgcaacacaaatgtcttttcctgtacaaggtgttcatactgtggcacaaactgtttcaagaattccacaaaatccttcacctcatacccaccagcaacaaaatgctccagtgactgtcattcaaagtaaagctccaattccttgtgaagttgttaaggctacagttatccagaattccataccccagacaggagttcctgttagtattgctgttggaggaggacctccacagagttctgttgttcagaatcatagtacagggccacaacctgttacagttgtgaattctcagacattgcttcaccatccatctgtaattccacagcagtctccattacacacagtggtaccaggacagatcccttcaggcactcctgttacagtaattcaacaagctgtcccacagagtcatatgtttggcagagtacagaacataccagcatgtacttctacagtttcacagggtcaacagttaatcaccacatcaccccaacctgtgcaaacttcatctcaacagacatcagctggtagccagtcacaagatactgttatcatagcacccccacagtatgtaacaacttctgcatccaatattgtctcagcaacttcagtacagaattttcaggtagctacaggacaaatggttactattgctggtgtcccaagtccacaagcctcaagggtagggtttcagaacattgcaccaaaacctctcccttctcagcaagtttcatctacagtggtacagcagcctattcaacaaccacagcagccaacccaacaaagcgtagtgattgtaagccagccagctcaacaaggtcaaacttatgcaccagccattcaccaaattgttcttgctaatccagcagctcttccagctggtcagacagttcagctaactggacaacctaacataactccatcttcttcaccatcacctgtcccagctactaataaccaagtccctactgccatgtcgtcgtcctctacccctcaatcacagggaccacctcctactgtcagtcaaatgttatctgtgaaaaggcagcaacagcagcaacattcaccagcacccccaccacagcaggtacaagtacaagttcagcagccccaacaagtacagatgcaagttcaacctcaacagtcgaatgcaggagttggtcagcctgcctctggtgagtcgagtctgattaaacagcttctgcttccgaaacgtggtccttcaacaccaggtggtaagcttattctcccagctccacagattcctccccctaataatgcaagagctcctagccctcaggtggtctatcaggtggccagtaaccaagccgcaggttttggagtgcaggggcaaactccagctcagcagctattggttgggcagcaaaatgttcagttggtcccaagtgcaatgccaccctcagggggagtacaaactgtgcccatttcgaacttacaaatattgccaggtccactgatctcaaatagcccagcaaccattttccaagggacttctggcaaccaggtaaccataacagttgtgccaaatacgagttttgcacctgcaactgtgagtcagggaaatgcaactcagctcattgctccagcaggaattaccatgagcggaacgcagacaggagttggacttccagtacaaacgcttccagccactcaagcatctcctgctggacaatcatcatgtactactgctactcccccattcaaaggtgataaaataatttgccaaaaggaggaggaagcaaaggaagcaacaggtttacatgttcatgaacgtaaaattgaagtcatggagaacccgtcctgccgacgaggagccacaaacaccagcaatggggatacaaaggaaaatgaaatgcatgtgggaagtcttttaaatgggagaaagtacagtgactcaagtctacctccttcaaactcagggaaaattcaaagtgagactaatcagtgctcactaatcagtaatgggccatcattggaattaggtgagaatggagcatctgggaaacagaactcagaacaaatagacatgcaagatatcaaaagtgatttgagaaaaccgctagttaatggaatctgtgattttgataaaggagatggttctcatttaagcaaaaacattccaaatcataaaacttccaatcatgtaggaaatggtgagatatctccaatggaaccacaagggactttagatatcactcagcaagatactgccaaaggtgatcaactagaaagaatttctaatggacctgtattaactttgggtggttcatctgtgagcagtatacaggaggcttcaaatgcggcaacacagcaatttagtggtactgatttgcttaatggacctctagcttcaagtttgaattcagatgtgcctcagcaacgcccaagtgtagttgtctcaccacattctacaacctctgttatacagggacatcaaatcatagcagttcccgactcaggatcaaaagtatcccattctcctgccctatcatctgacgttcggtctacaaatggcacagcagaatgcaaaactgtaaagaggccagcagaggatactgatagggaaacagtcgcaggaattccaaataaagtaggagttagaattgttacaatcagtgaccccaacaatgctggctgcagcgcaacaatggttgctgtgccagcaggagcagatccaagcactgtagctaaagtagcaatagaaagtgctgttcagcaaaagcaacagcatccaccaacatatgtacagaatgtggtcccgcagaacactcctatgccaccttcaccagctgtacaagtgcagggccagcctaacagttctcagccttctccattcagtggatccagtcagcctggagatccaatgagaaaacctggacagaacttcatgtgtctgtggcagtcttgtaaaaagtggtttcagacaccctcacaggttttctaccatgcagcaactgaacatggaggaaaagatgtatatccagggcagtgtctttgggaaggttgtgagccttttcagcgacagcggttttcttttattacccacttgcaggataagcactgttcaaaggatgccctacttgcaggattaaaacaagatgaaccaggacaagcaggaagtcagaagtcttctaccaagcagccaactgtagggggcacaagctcaactcctagagcacaaaaggccattgtgaatcatcccagtgctgcacttatggctctgaggagaggatcaagaaaccttgtctttcgagattttacagatgaaaaagagggaccaataactaaacacatccgactaacagctgccttaatattaaaaaatattggtaaatattcagaatgtggtcgcagattgttaaagagacatgaaaataacttatcagtgctagccattagtaacatggaagcttcctccacccttgccaaatgcctttatgaacttaattttacagttcagagtaaggaacaagaaaaagactcagaaatgctgcagtga

SEQ ID NO: 14 - DNA, 3567 bp, Homo sapiens
atggagcccaactcactccagtgggtcggctcaccgtgtggcttgcacggaccttacattttctacaaggcttttcaattccaccttgaaggcaaaccaagaattttgtcccttggcgactttttctttgtaagatgtacgccaaaggatccgatttgcatagcggagctccagctgttgtgggaagagaggaccagccggcaacttttatccagctctaaactttatttcctcccagaagacactccccagggcagaaatagcgaccatggcgaggatgaagtcattgctgtttccgaaaaggtgattgtgaagcttgaagacctggtcaagtgggtacattctgatttctccaagtggagatgtggcttccacgctggaccagtgaaaactgaggccttgggaaggaatggacagaaggaagctctgctgaagtacaggcagtcaaccctaaacagtggactcaacttcaaagacgttctcaaggagaaggcagacctgggggaggacgaggaagaaacgaacgtgatagttctcagctacccccagtactgccggtaccgctcgatgctgaaacgcatccaggataagccatcttccattctaacggaccagtttgcattggccctggggggcattgcagtggtcagcaggaaccctcagatcctgtactgtcgggacacctttgaccacccgactctcatagaaaacgagagtatatgcgatgagtttgcgccaaatcttaaaggcagaccacgcaaaaagaaaccatgcccacaaagaagagattcattcagtggtgttaaggattccaacaacaattccgatggcaaagccgttgccaaggtgaaatgtgaggccaggtcagccttgaccaagccgaagaataaccataactgtaaaaaagtctcaaatgaagaaaaaccaaaggttgccattggtgaagagtgcagggcagatgaacaagccttcttggtggcactttataaatacatgaaagaaaggaaaacgccgatagaacgaataccctatttaggttttaaacagattaacctttggactatgtttcaagctgctcaaaaactgggaggatatgaaacaataacagcccgccgtcagtggaaacatatttatgatgaattaggcggtaatcctgggagcaccagcgctgccacttgtacccgcagacattatgaaagattaatcctaccatatgaaagatttattaaaggagaagaagataagcccctgcctccaatcaaacctcggaaacaggagaacagttcacaggaaaatgagaacaaaacaaaagtatctggaaccaaacgcatcaaacatgaaatacctaaaagcaagaaagaaaaagaaaatgccccaaagccccaggatgcagcagaggtttcatcagagcaagaaaaagaacaagagactttaataagccagaaaagcatccctgagcctctcccagcagcagacatgaagaaaaaaatagaagggtatcaggaattttcagcgaagcccctggcatccagagtagacccagagaaggacaacgaaacagaccaaggttccaacagtgagaaggtggcagaggaggcgggagagaaggggcccacacctccactcccaagtgctcctctggccccagaaaaagattcagccttggtccctggggccagcaaacagccactcacctctcctagtgccctggtggactcaaaacaagaatccaaactgtgctgttttacagagagccctgaaagtgaaccccaagaagcatccttccccagcttccccaccacacagccaccgctggcaaaccagaatgagacggaggatgacaaactgcccgccatggcagattacattgccaactgcaccgtgaaggtggaccagctgggcagtgacgacatccacaatgcgctcaagcagaccccaaaggtccttgtggtccagtcgtttgacatgttcaaagacaaagacctgactgggcccatgaacgagaaccatggacttaattacacgcccctgctctactctaggggcaacccaggcatcatgtccccactggccaagaaaaagcttttgtcccaagtgagtggggccagcctctccagcagctacccttatggctccccaccccctttgatcagcaaaaagaaactgattgctagggatgacttgtgttccagtttgtcccagacccaccatggccaaagcactgaccatatggcggtcagccggccatcagtgattcagcacgtccagagtttcagaagcaagccctcggaagagagaaagaccatcaatgacatctttaagcatgagaaactgagtcgatcagatccccaccgctgcagcttctccaagcatcaccttaacccccttgctgactcctacgtcctgaagcaagaaattcaggagggcaaggataaactcttagagaaaagggccctcccccattcccacatgcctagcttcctggctgacttctactcgtcccctcatctccatagcctctacagacacaccgagcaccatcttcataatgaacagacatccaaatacccttccagggacatgtacagggaatcggaaaacagttcttttccttcccacagacaccaagaaaagctccatgtaaattatctcacgtccctgcacctgcaagacaaaaagtcggcggcagcagaagcccctacggatgatcagcctacagatctgagccttcccaagaacccgcacaaacctaccggcaaggtcctgggcctggctcattccaccacagggccccaggagagcaaaggcatctcccagttccaggtcttaggcagccagagtcgagactgtcaccccaaagcctgtcgggtatcacccatgaccatgtcaggccctaaaaaataccctgaatcgctttcaagatcaggaaaacctcaccatgtgagactggagaatttcaggaagatggaaggcatggtccacccaatcctgcaccggaaaatgagcccgcagaacattggggcggcgcggccgatcaagcgcagcctggaggatttggaccttgtgattgcagggaaaaaggcccgggcagtgtctcccttagacccatccaaggaggtctctgggaaggagaaggcctctgagcaggagagtgaaggcagcaaagcagcgcacggtgggcattccgggggcggatcagaaggccacaagcttcccctctcctcccctatcttcccaggtctgtattccgggagcctgtgtaactcgggcctcaactccaggctcccggctgggtattctcattctctgcagtacttgaaaaaccagactgtgctttctccactcatgcagcccctggctttccactcgcttgtgatgcaaagaggaatttttacatcaccgacaaattctcagcagctgtacagacacttggctgcggctacacctgtaggaagttcatatggggaccttttgcataacagcatttaccctttagctgctataaatcctcaagctgcctttccatcttcccagctgtcatccgtgcaccccagtacaaaactgtag

SEQ ID NO: 15 - DNA, 4626 bp, Homo sapiens
atgaaggacaaacagaagaagaagaaggagcgcacgtgggccgaggccgcgcgcctggtattagaaaactactcggatgctccaatgacaccaaaacagattctgcaggtcatagaggcagaaggactaaaggaaatgagaagtgggacttcccctctcgcatgcctcaatgctatgctacattccaattcaagaggaggagaggggttgttttataaactgcctggccgaatcagccttttcacgctcaagaaggatgccctgcagtggtctcgccatccagctacagtggagggagaggagccagaggacacggctgatgtggagagctgtgggtctaatgaagccagcactgtgagtggtgaaaacgatgtatctcttgatgaaacatcttcgaacgcatcctgttctacagaatctcagagtcgacctctttccaatcccagggacagctacagagcttcctcacaggcgaacaaacaaaagaaaaagactggggtgatgctgcctcgagttgtcctgactcctctgaaggtaaacggggcccacgtggaatctgcatcagggttctcgggctgccacgccgatggcgagagcggcagcccgtccagcagcagcagcggctctctggccctgggcagcgctgctattcgtggccaggccgaggtcacccaggaccctgccccgctcctgagaggcttccggaagccagccacaggtcaaatgaagcgcaacagaggggaagaaatagattttgagacacctgggtccattcttgtcaacaccaacctccgtgccctgatcaactctcggaccttccatgccttaccatcacacttccagcagcagctcctcttcctcctgcctgaagtagacagacaggtggggacggatggcctgttgcgtctcagcagcagtgcactaaataacgagttttttacccatgcggctcagagctggcgggagcgcctggctgatggtgaatttactcatgagatgcaagtcaggatacgacaggaaatggagaaggaaaagaaggtggaacaatggaaagaaaagttctttgaagactactatggacagaagctgggtttgaccaaagaagagtcattgcagcagaacgtgggccaggaggaggctgaaatcaaaagtggcttgtgtgtcccaggagaatcagtgcgtatacagcgtggtccagccacccgacagcgagatgggcattttaagaaacgctctcggccagatctccgaaccagagccagaaggaatctgtacaaaaaacaggagtcagaacaagcaggggttgctaaggatgcaaaatctgtggcctcagatgttcccctctacaaggatggggaggctaagactgacccagcagggctgagcagtccccatctgccaggcacatcctctgcagcacccgacctggagggtcccgaattcccagttgagtctgtggcttctcggatccaggctgagccagacaacttggcacgtgcctctgcatctccagacagaattcctagcctgcctcaggaaactgtggatcaggaacccaaggatcagaagaggaaatcctttgagcaggcggcctctgcatcctttcccgaaaagaagccccggcttgaagatcgtcagtcctttcgtaacacaattgaaagtgttcacaccgaaaagccacagcccactaaagaggagcccaaagtcccgcccatccggattcaactttcacgtatcaaaccaccctgggtggttaaaggtcagcccacttaccagatatgcccccggatcatccccaccacggagtcctcctgccggggttggactggcgccaggaccctcgcagacattaaagcccgtgctctgcaggtccgaggggcgagaggtcaccactgccatagagaggcggccaccactgccatcggaggggggggtggcccgggtggaggtggcggcggggccaccgatgagggaggtggcagaggcagcagcagtggtgatggtggtgaggcctgtggccaccctgagcccaggggaggcccgagcacccctggaaagtgtacgtcagatctacagcgaacacaactactgccgccttatcctctaaatggggagcatacccaggccggaactgccatgtccagagctaggagagaggacctgccttctctgagaaaggaggaaagctgcctactacagagggctacagttggactcacagatgggctaggagatgcctcccaactccccgttgctcccactggggaccagccatgccaggccttgcccctactgtcctcccaaacctcagtagctgagagattagtggagcagcctcagttgcatccggatgttagaactgaatgtgagtctggcaccacttcctgggaaagtgatgatgaggagcaaggacccaccgttcctgcagacaatggtcccattccgtctctagtgggagatgatacattagagaaaggaactggccaagctcttgacagtcatcccactatgaaggatcctgtaaatgtgacccccagttccacacctgaatcctcaccgactgattgcctgcagaacagagcatttgatgacgaattagggcttggtggctcatgccctcctatgagggaaagtgatactagacaagaaaacttgaaaaccaaggctctcgtttctaacagttctttgcattggatacccatcccatcgaatgatgaggtagtgaaacagcccaaaccagaatccagagaacacataccatctgttgagccccaggttggagaggagtgggagaaagctgctcccacccctcctgcattgcctggggatttgacagctgaggagggtctagatcctcttgacagccttacttcactctggactgtgccatctcgaggaggcagtgacagcaatggcagttactgtcaacaggtggacattgaaaagctgaaaatcaacggagactctgaagcactgagtcctcacggtgagtccacggatacagcctctgactttgaaggtcacctcacggaggacagcagtgaggctgacactagagaagctgcagtgacaaagggatcttcggtggacaaggatgagaaacccaattggaaccaatctgccccactgtccaaggtgaatggtgacatgcgtctggttacaaggacagatgggatggttgctcctcagagctgggtgtctcgagtatgtgcggtccgccaaaagatcccagattccctactgctggccagtactgagtaccagccaagagccgtgtgcctgtccatgcctgggtcctcagtggaggccactaacccacttgtgatgcagttgctgcagggtagcttgcccctagagaaggttcttccaccagcccacgatgacagcatgtcagaatccccacaagtaccacttacaaaagaccagagccatggctcgctacgcatgggatctttacatggtcttggaaaaaacagtggcatggttgatggaagcagccccagttctttaagggctttgaaggagcctcttctgccagatagctgtgaaacaggcactggtcttgccaggattgaggccacccaggctcctggagcaccccaaaagaattgcaaggcagtcccaagttttgactccctccatccagtgacaaatcccattacatcctctaggaaactggaagaaatggattccaaagagcagttctcttcctttagttgtgaagatcagaaggaagtccgtgctatgtcacaggacagtaattcaaatgctgctccaggaaagagcccaggagatcttactacctcgagaacacctcgtttctcatctccaaatgtgatctcctttggtccagagcagacaggtcgggccctgggtgatcagagcaatgttacaggccaagggaagaagctttttggctctgggaatgtggctgcaacccttcagcgccccaggcctgcggacccgatgcctcttcctgctgagatccctccagtttttcccagtgggaagttgggaccaagcacaaactccatgtctggtggggtacagactccaagggaagactgggctccaaagccacatgcctttgttggcagcgtcaagaatgagaagacttttgtggggggtcctcttaaggcaaatgccgagaacaggaaagctactgggcatagtcccctggaactggtgggtcacttggaagggatgccctttgtcatggacttgcccttctggaaattaccccgagagccagggaaggggctcagtgagcctctggagccttcttctctcccctcccaactcagcatcaagcaggcattttatgggaagctttctaaactccaactgagttccaccagctttaattattcctctagctctcccacctttcccaaaggccttgctggaagtgtggtgcagctgagccacaaagcaaactttggtgcgagccacagtgcatcactttccttgcaaatgttcactgacagcagcacggtggaaagcatctcgctccagtgtgcgtgcagcctgaaagccatgatcatgtgccaaggctgcggtgcgttctgtcacgatgactgtattggaccctcaaagctctgtgtattgtgccttgtggtgagataa

SEQ ID NO: 16 - DNA, 9171 bp, Homo sapiens
atgagtctagtacttaatgatctgcttatctgctgccgtcaactagaacatgatagagctacagaacgaaagaaagaagttgagaaatttaagcgcctgattcgagatcctgaaacaattaaacatctagatcggcattcagattccaaacaaggaaaatatttgaattgggatgctgtttttagatttttacagaaatatattcagaaagaaacagaatgtctgagaatagcaaaaccaaatgtatcagcctcaacacaagcctccaggcagaaaaagatgcaggaaatcagtagtttggtcaaatacttcatcaaatgtgcaaacagaagagcacctaggctaaaatgtcaagaactcttaaattatatcatggatacagtgaaagattcatctaatggtgctatttacggagctgattgtagcaacatactactcaaagacattctttctgtgagaaaatactggtgtgaaatatctcagcaacagtggttagaattgttctctgtgtacttcaggctctatctgaaaccttcacaagatgttcatagagttttagtggctagaataattcatgctgttaccaaaggatgctgttctcagactgacggattaaattccaaatttttggactttttttccaaggctattcagtgtgcgagacaagaaaagagctcttcaggtctaaatcatatcttagcagctcttactatcttcctcaagactttggctgtcaactttcgaattcgagtgtgtgaattaggagatgaaattcttcccactttgctttatatttggactcaacataggcttaatgattctttaaaagaagtcattattgaattatttcaactgcaaatttatatccatcatccgaaaggagccaaaacccaagaaaaaggtgcttatgaatcaacaaaatggagaagtattttatacaacttatatgatctgctagtgaatgagataagtcatataggaagtagaggaaagtattcttcaggatttcgtaatattgccgtcaaagaaaatttgattgaattgatggcagatatctgtcaccaggtttttaatgaagataccagatccttggagatttctcaatcttacactactacacaaagagaatctagtgattacagtgtcccttgcaaaaggaagaaaatagaactaggctgggaagtaataaaagatcaccttcagaagtcacagaatgattttgatcttgtgccttggctacagattgcaacccaattaatatcaaagtatcctgcaagtttacctaactgtgagctgtctccattactgatgatactatctcagcttctaccccaacagcgacatggggaacgtacaccatatgtgttacgatgccttacggaagttgcattgtgtcaagacaagaggtcaaacctagaaagctcacaaaagtcagatttattaaaactctggaataaaatttggtgtattacctttcgtggtataagttctgagcaaatacaagctgaaaactttggcttacttggagccataattcagggtagtttagttgaggttgacagagaattctggaagttatttactgggtcagcctgcagaccttcatgtcctgcagtatgctgtttgactttggcactgaccaccagtatagttccaggaacggtaaaaatgggaatagagcaaaatatgtgtgaagtaaatagaagcttttctttaaaggaatcaataatgaaatggctcttattctatcagttagagggtgacttagaaaatagcacagaagtgcctccaattcttcacagtaattttcctcatcttgtactggagaaaattcttgtgagtctcactatgaaaaactgtaaagctgcaatgaattttttccaaagcgtgccagaatgtgaacaccaccaaaaagataaagaagaactttcattctcagaagtagaagaactatttcttcagacaacttttgacaagatggactttttaaccattgtgagagaatgtggtatagaaaagcaccagtccagtattggcttctctgtccaccagaatctcaaggaatcactggatcgctgtcttctgggattatcagaacagcttctgaataattactcatctgagattacaaattcagaaactcttgtccggtgttcacgtcttttggtgggtgtccttggctgctactgttacatgggtgtaatagctgaagaggaagcatataagtcagaattattccagaaagccaagtctctaatgcaatgtgcaggagaaagtatcactctgtttaaaaataagacaaatgaggaattcagaattggttccttgagaaatatgatgcagctatgtacacgttgcttgagcaactgtaccaagaagagtccaaataagattgcatctggctttttcctgcgattgttaacatcaaagctaatgaatgacattgcagatatttgtaaaagtttagcatccttcatcaaaaagccatttgaccgtggagaagtagaatcaatggaagatgatactaatggaaatctaatggaggtggaggatcagtcatccatgaatctatttaacgattaccctgatagtagtgttagtgatgcaaacgaacctggagagagccaaagtaccataggtgccattaatcctttagctgaagaatatctgtcaaagcaagatctacttttcttagacatgctcaagttcttgtgtttgtgtgtaactactgctcagaccaatactgtgtcctttagggcagctgatattcggaggaaattgttaatgttaattgattctagcacgctagaacctaccaaatccctccacctgcatatgtatctaatgcttttaaaggagcttcctggagaagagtaccccttgccaatggaagatgttcttgaacttctgaaaccactatccaatgtgtgttctttgtatcgtcgtgaccaagatgtttgtaaaactattttaaaccatgtccttcatgtagtgaaaaacctaggtcaaagcaatatggactctgagaacacaagggatgctcaaggacagtttcttacagtaattggagcattttggcatctaacaaaggagaggaaatatatattctctgtaagaatggccctagtaaattgccttaaaactttgcttgaggctgatccttattcaaaatgggccattcttaatgtaatgggaaaagactttcctgtaaatgaagtatttacacaatttcttgctgacaatcatcaccaagttcgcatgttggctgcagagtcaatcaatagattgttccaggacacgaagggagattcttccaggttactgaaagcacttcctttgaagcttcagcaaacagcttttgaaaatgcatacttgaaagctcaggaaggaatgagagaaatgtcccatagtgctgagaaccctgaaactttggatgaaatttataatagaaaatctgttttactgacgttgatagctgtggttttatcctgtagccctatctgcgaaaaacaggctttgtttgccctgtgtaaatctgtgaaagagaatggattagaacctcaccttgtgaaaaaggttttagagaaagtttctgaaacttttggatatagacgtttagaagactttatggcatctcatttagattatctggttttggaatggctaaatcttcaagatactgaatacaacttatcttcttttccttttattttattaaactacacaaatattgaggatttctatagatcttgttataaggttttgattccacatctggtgattagaagtcattttgatgaggtgaagtccattgctaatcagattcaagaggactggaaaagtcttctaacagactgctttccaaagattcttgtaaatattcttccttattttgcctatgagggtaccagagacagtgggatggcacagcaaagagagactgctaccaaggtctatgatatgcttaaaagtgaaaacttattgggaaaacagattgatcacttattcattagtaatttaccagagattgtggtggagttattgatgacgttacatgagccagcaaattctagtgccagtcagagcactgacctctgtgacttttcaggggatttggatcctgctcctaatccacctcattttccatcgcatgtgattaaagcaacatttgcctatatcagcaattgtcataaaaccaagttaaaaagcattttagaaattctttccaaaagccctgattcctatcagaaaattcttcttgccatatgtgagcaagcagctgaaacaaataatgtttataagaagcacagaattcttaaaatatatcacctgtttgttagtttattactgaaagatataaaaagtggcttaggaggagcttgggcctttgttcttcgagacgttatttatactttgattcactatatcaaccaaaggccttcttgtatcatggatgtgtcattacgtagcttctccctttgttgtgacttattaagtcaggtttgccagacagccgtgacttactgtaaggatgctctagaaaaccatcttcatgttattgttggtacacttataccccttgtgtatgagcaggtggaggttcagaaacaggtattggacttgttgaaatacttagtgatagataacaaggataatgaaaacctctatatcacgattaagcttttagatccttttcctgaccatgttgtttttaaggatttgcgtattactcagcaaaaaatcaaatacagtagaggacccttttcactcttggaggaaattaaccattttctctcagtaagtgtttatgatgcacttccattgacaagacttgaaggactaaaggatcttcgaagacaactggaactacataaagatcagatggtggacattatgagagcttctcaggataatccgcaagatgggattatggtgaaactagttgtcaatttgttgcagttatccaagatggcaataaaccacactggtgaaaaagaagttctagaggctgttggaagctgcttgggagaagtgggtcctatagatttctctaccatagctatacaacatagtaaagatgcatcttataccaaggcccttaagttatttgaagataaagaacttcagtggaccttcataatgctgacctacctgaataacacactggtagaagattgtgtcaaagttcgatcagcagctgttacctgtttgaaaaacattttagccacaaagactggacatagtttctgggagatttataagatgacaacagatccaatgctggcctatctacagccttttagaacatcaagaaaaaagtttttagaagtacccagatttgacaaagaaaacccttttgaaggcctggatgatataaatctgtggattcctctaagtgaaaatcatgacatttggataaagacactgacttgtgcttttttggacagtggaggcacaaaatgtgaaattcttcaattattaaagccaatgtgtgaagtgaaaactgacttttgtcagactgtacttccatacttgattcatgatattttactccaagatacaaatgaatcatggagaaatctgctttctacacatgttcagggatttttcaccagctgtcttcgacacttctcgcaaacgagccgatccacaacccctgcaaacttggattcagagtcagagcactttttccgatgctgtttggataaaaaatcacaaagaacaatgcttgctgttgtggactacatgagaagacaaaagagaccttcttcaggaacaatttttaatgatgctttctggctggatttaaattatctagaagttgccaaggtagctcagtcttgtgctgctcactttacagctttactctatgcagaaatctatgcagataagaaaagtatggatgatcaagagaaaagaagtcttgcatttgaagaaggaagccagagtacaactatttctagcttgagtgaaaaaagtaaagaagaaactggaataagtttacaggatcttctcttagaaatctacagaagtataggggagccagatagtttgtatggctgtggtggagggaagatgttacaacccattactagactacgaacatatgaacacgaagcaatgtggggcaaagccctagtaacatatgacctcgaaacagcaatcccctcatcaacacgccaggcaggaatcattcaggccttgcagaatttgggactctgccatattctttccgtctatttaaaaggattggattatgaaaataaagactggtgtcctgaactagaagaacttcattaccaagcagcatggaggaatatgcagtgggaccattgcacttccgtcagcaaagaagtagaaggaaccagttaccatgaatcattgtacaatgctctacaatctctaagagacagagaattctctacattttatgaaagtctcaaatatgccagagtaaaagaagtggaagagatgtgtaagcgcagccttgagtctgtgtattcgctctatcccacacttagcaggttgcaggccattggagagctggaaagcattggggagcttttctcaagatcagtcacacatagacaactctctgaagtatatattaagtggcagaaacactcccagcttctcaaggacagtgattttagttttcaggagcctatcatggctctacgcacagtcattttggagatcctgatggaaaaggaaatggacaactcacaaagagaatgtattaaggacattctcaccaaacaccttgtagaactctctatactggccagaactttcaagaacactcagctccctgaaagggcaatatttcaaattaaacagtacaattcagttagctgtggagtctctgagtggcagctggaagaagcacaagtattctgggcaaaaaaggagcagagtcttgccctgagtattctcaagcaaatgatcaagaagttggatgccagctgtgcagcgaacaatcccagcctaaaacttacatacacagaatgtctgagggtttgtggcaactggttagcagaaacgtgcttagaaaatcctgcggtcatcatgcagacctatctagaaaaggcagtagaagttgctggaaattatgatggagaaagtagtgatgagctaagaaatggaaaaatgaaggcatttctctcattagcccggttttcagatactcaataccaaagaattgaaaactacatgaaatcatcggaatttgaaaacaagcaagctctcctgaaaagagccaaagaggaagtaggtctccttagggaacataaaattcagacaaacagatacacagtaaaggttcagcgagagctggagttggatgaattagccctgcgtgcactgaaagaggatcgtaaacgcttcttatgtaaagcagttgaaaattatatcaactgcttattaagtggagaagaacatgatatgtgggtattccgactttgttccctctggcttgaaaattctggagtttctgaagtcaatggcatgatgaagagagacggaatgaagattccaacatataaatttttgcctcttatgtaccaattggctgctagaatggggaccaagatgatgggaggcctaggatttcatgaagtcctcaataatctaatctctagaatttcaatggatcacccccatcacactttgtttattatactggccttagcaaatgcaaacagagatgaatttctgactaaaccagaggtagccagaagaagcagaataactaaaaatgtgcctaaacaaagctctcagcttgatgaggatcgaacagaggctgcaaatagaataatatgtactatcagaagtaggagacctcagatggtcagaagtgttgaggcactttgtgatgcttatattatattagcaaacttagatgccactcagtggaagactcagagaaaaggcataaatattccagcagaccagccaattactaaacttaagaatttagaagatgttgttgtccctactatggaaattaaggtggaccacacaggagaatatggaaatctggtgactatacagtcatttaaagcagaatttcgcttagcaggaggtgtaaatttaccaaaaataatagattgtgtaggttccgatggcaaggagaggagacagcttgttaagggccgtgatgacctgagacaagatgctgtcatgcaacaggtcttccagatgtgtaatacattactgcagagaaacacggaaactaggaagaggaaattaactatctgtacttataaggtggttcccctctctcagcgaagtggtgttcttgaatggtgcacaggaactgtccccattggtgaatttcttgttaacaatgaagatggtgctcataaaagatacaggccaaatgatttcagtgcctttcagtgccaaaagaaaatgatggaggtgcaaaaaaagtcttttgaagagaaatatgaagtcttcatggatgtttgccaaaattttcaaccagttttccgttacttctgcatggaaaaattcttggatccagctatttggtttgagaagcgattggcttatacgcgcagtgtagctacttcttctattgttggttacatacttggacttggtgatagacatgtacagaatatcttgataaatgagcagtcagcagaacttgtacatatagatctaggtgttgcttttgaacagggcaaaatccttcctactcctgagacagttccttttagactcaccagagatattgtggatggcatgggcattacgggtgttgaaggtgtcttcagaagatgctgtgagaaaaccatggaagtgatgagaaactctcaggaaactctgttaaccattgtagaggtccttctatatgatccactctttgactggaccatgaatcctttgaaagctttgtatttacagcagaggccggaagatgaaactgagcttcaccctactctgaatgcagatgaccaagaatgcaaacgaaatctcagtgatattgaccagagtttcaacaaagtagctgaacgtgtcttaatgagactacaagagaaactgaaaggagtggaagaaggcactgtgctcagtgttggtggacaagtgaatttgctcatacagcaggccatagaccccaaaaatctcagccgacttttcccaggatggaaagcttgggtgtga

SEQ ID NO: 17 - DNA, 2532 bp, Homo sapiens
atgagtagcgctatgttggtgacttgcctcccggaccccagcagcagcttccgtgaggatgccccgcggcccccagtgccaggggaagaaggggagaccccaccgtgtcagccaggggtgggcaagggccaggtcaccaaacccatgcctgtctcttccaacaccaggcggaacgaagatgggttgggggagccggaggggcgggcatctccggattcccctctgacccggtggaccaagtccttacactccttattgggcgatcaagacggtgcttacctgttccgaactttcctggagagggagaaatgcgtggataccttagacttctggtttgcctgcaatggattcaggcagatgaacctgaaggataccaaaactttacgagtagccaaagcgatctacaaaaggtacattgagaacaacagcattgtctccaagcagctgaagcctgccaccaagacctacataagagatggcatcaagaagcagcagattgattccatcatgtttgaccaggcgcagaccgagatccagtcggtgatggaggaaaatgcctaccagatgtttttgacttctgatatatacctcgaatatgtgaggagtgggggagaaaacacagcttacatgagtaatgggggactcgggagcctaaaggtcgtgtgtggctatctccccaccttgaatgaagaagaggagtggacttgtgccgacttcaagtgcaaactttcgccaaccgtggttggcttgtccagcaaaactctgagggccacggcgagtgtgaggtccacggaaactgttgacagtggatacaggtccttcaagaggagcgatcctgttaatccttatcacataggttctggctatgtctttgcaccagccaccagcgccaacgacagtgagatatccagtgatgcgctgacggatgattccatgtccatgacggacagcagtgtagatggaattcctccttatcgtgtgggcagtaagaaacagctccagagagaaatgcatcgcagtgtgaaggccaatggccaagtgtctctacctcatttcccgagaacccaccgcctgcccaaggagatgacccccgtggaacccgccacctttgcagctgagctgatctcgaggctggaaaagctgaagctggagttggagagccgccacagcctggaggagcgcctgcagcagatccgagaggatgaagagagagagggctccgagctcacactcaattcgcgggagggggcgcccacgcagcaccccctctccctactgccctccggcagctacgaggaagacccgcagacgatactggacgatcacctgtccagggtcctcaagacccctggctgccagtctccaggcgtaggccgctatagcccccgctcccgctccccggaccaccaccaccaccaccattcgcagtaccactccctgctcccgcccggtggcaagctgcctcccgcggccgcctcgccgggcgcctgccccctcctcgggggcaaaggctttgtgaccaagcagacgacgaagcatgtccaccaccactacatccaccaccatgccgtccccaagaccaaggaggagatcgaggcggaggccacgcagcgggtgcactgcttctgccctgggggcagcgagtattactgctactcgaaatgcaaaagccactccaaggctccggaaaccatgcccagcgagcagtttggcggcagcagaggcagtaccttgcccaaacgcaatgggaaaggcacggagccgggcctggccctgcccgccagggaaggaggggcccccggcggagctggggccctgcagcttccccgggaggaaggagacaggtcgcaggatgtctggcagtggatgctggagagtgagcggcagagcaagcccaagccccatagtgcccaaagcacaaaaaaggcctaccccttggagtctgcccgctcgtctccaggcgaacgagccagccggcaccatctgtgggggggcaacagcgggcacccccgcaccaccccccgtgcccacctgttcacccaggaccctgcgatgcctcccctgaccccacccaacacgctggctcagctggaggaggcctgtcgcaggctagctgaggtgtcgaagcccccaaagcagcggtgctgtgtggccagtcagcagagggacaggaatcattcggccactgttcagacgggagccacacccttctccaatccaagcctggctccagaagatcacaaagagccaaagaaactggcaggtgtccacgcgctccaggccagtgagttggttgtcacttactttttctgtggggaagaaattccataccggaggatgctgaaggctcagagcttgaccctgggccactttaaagagcagctcagcaaaaagggaaattataggtattacttcaaaaaagcaagcgatgagtttgcctgtggagcggtgtttgaggagatctgggaggatgagacggtgctcccgatgtatgaaggccggattctgggcaaagtggagcggatcgattga

SEQ ID NO: 18 - DNA, 897 bp, Homo sapiens
atggtaagaatggtgcctgtcctgctgtctctgctgctgcttctgggtcctgctgtcccccaggagaaccaagatggtcgttactctctgacctatatctacactgggctgtccaagcatgttgaagacgtccccgcgtttcaggcccttggctcactcaatgacctccagttctttagatacaacagtaaagacaggaagtctcagcccatgggactctggagacaggtggaaggaatggaggattggaagcaggacagccaacttcagaaggccagggaggacatctttatggagaccctgaaagacatcgtggagtattacaacgacagtaacgggtctcacgtattgcagggaaggtttggttgtgagatcgagaataacagaagcagcggagcattctggaaatattactatgatggaaaggactacattgaattcaacaaagaaatcccagcctgggtccccttcgacccagcagcccagataaccaagcagaagtgggaggcagaaccagtctacgtgcagcgggccaaggcttacctggaggaggagtgccctgcgactctgcggaaatacctgaaatacagcaaaaatatcctggaccggcaagatcctccctctgtggtggtcaccagccaccaggccccaggagaaaagaagaaactgaagtgcctggcctacgacttctacccagggaaaattgatgtgcactggactcgggccggcgaggtgcaggagcctgagttacggggagatgttcttcacaatggaaatggcacttaccagtcctgggtggtggtggcagtgcccccgcaggacacagccccctactcctgccacgtgcagcacagcagcctggcccagcccctcgtggtgccctgggaggccagctag

SEQ ID NO: 19 - DNA, 360 bp, Homo sapiens
atgtctcgctccgtggccttagctgtgctcgcgctactctctctttctggcctggaggctatccagcgtactccaaagattcaggtttactcacgtcatccagcagagaatggaaagtcaaatttcctgaattgctatgtgtctgggtttcatccatccgacattgaagttgacttactgaagaatggagagagaattgaaaaagtggagcattcagacttgtctttcagcaaggactggtctttctatctcttgtactacactgaattcacccccactgaaaaagatgagtatgcctgccgtgtgaaccatgtgactttgtcacagcccaagatagttaagtgggatcgagacatgtaa

SEQ ID NO: 20 - DNA, 2190 bp, Homo sapiens
atgaataagggctggctggagctggagagcgacccaggcctcttcaccctgctcgtggaagatttcggtgtcaagggggtgcaagtggaggagatctacgaccttcagagcaaatgtcagggccctgtatatggatttatcttcctgttcaaatggatcgaagagcgccggtcccggcgaaaggtctctaccttggtggatgatacgtccgtgattgatgatgatattgtgaataacatgttctttgcccaccagctgatacccaactcttgtgcaactcatgccttgctgagcgtgctcctgaactgcagcagcgtggacctgggacccaccctgagtcgcatgaaggacttcaccaagggtttcagccctgagagcaaaggatatgcgattggcaatgccccggagttggccaaggcccataatagccatgccaggcccgagccacgccacctccctgagaagcagaatggccttagtgcagtgcggaccatggaggcgttccactttgtcagctatgtgcctatcacaggccggctctttgagctggatgggctgaaggtctaccccattgaccatgggccctggggggaggacgaggagtggacagacaaggcccggcgggtcatcatggagcgtatcggcctcgccactgcaggggagccctaccacgacatccgcttcaacctgatggcagtggtgcccgaccgcaggatcaagtatgaggccaggctgcatgtgctgaaggtgaaccgtcagacagtactagaggctctgcagcagctgataagagtaacacagccagagctgattcagacccacaagtctcaagagtcacagctgcctgaggagtccaagtcagccagcaacaagtccccgctggtgctggaagcaaacagggcccctgcagcctctgagggcaaccacacagatggtgcagaggaggcggctggttcatgcgcacaagccccatcccacagccctcccaacaaacccaagctagtggtgaagcctccaggcagcagcctcaatggggttcaccccaaccccactcccattgtccagcggctgccggcctttctagacaatcacaattatgccaagtcccccatgcaggaggaagaagacctggcggcaggtgtgggccgcagccgagttccagtccgcccaccccagcagtactcagatgatgaggatgactatgaggatgacgaggaggatgacgtgcagaacaccaactctgcccttaggtataaggggaagggaacagggaagccaggggcattgagcggttctgctgatgggcaactgtcagtgctgcagcccaacaccatcaacgtcttggctgagaagctcaaagagtcccagaaggacctctcaattcctctgtccatcaagactagcagcggggctgggagtccggctgtggcagtgcccacacactcgcagccctcacccacccccagcaatgagagtacagacacggcctctgagatcggcagtgctttcaactcgccactgcgctcgcctatccgctcagccaacccgacgcggccctccagccctgtcacctcccacatctccaaggtgctttttggagaggatgacagcctgctgcgtgttgactgcatacgctacaaccgtgctgtccgtgatctgggtcctgtcatcagcacaggcctgctgcacctggctgaggatggggtgctgagtcccctggcgctgacagagggtgggaagggttcctcgccctccatcagaccaatccaaggcagccaggggtccagcagcccagtggagaaggaggtcgtggaagccacggacagcagagagaagacggggatggtgaggcctggcgagcccttgagtggggagaaatactcacccaaggagctgctggcactgctgaagtgtgtggaggctgagattgcaaactatgaggcgtgcctcaaggaggaggtagagaagaggaagaagttcaagattgatgaccagagaaggacccacaactacgatgagttcatctgcacctttatctccatgctggctcaggaaggcatgctggccaacctagtggagcagaacatctccgtgcggcggcgccaaggggtcagcatcggccggctccacaagcagcggaagcctgaccggcggaaacgctctcgcccctacaaggccaagcgccagtga

SEQ ID NO: 21 - DNA, 2763 bp, Homo sapiens
atgggtcgctccaattctagatcacattcttcaaggtcaaagtctagatcacagtctagttctcgatcaagatcaagatctcattctagaaagaagcgatacagttctaggtctcgttccagaacatattcaaggtctcgtagtagagatcgtatgtattctagagattatcgtcgcgattacagaaataatagaggaatgagacgaccttatgggtacagaggaaggggtagagggtattatcaaggaggaggaggtagatatcatcgaggtggttatagacctgtctggaatagaaggcactctaggagtcctagacgaggtcgttcacgttccaggagtccaaaaagaagatccgtttcttctcaaagatccagaagcagatctcgccggtcatatagatcttctaggtctccaagatcatcctcttctcgttcttcatccccatatagcaaatctcctgtttctaaaagacgagggtctcaggaaaaacaaaccaaaaaagctgaaggggaaccccaagaagagagtccgttgaaaagtaaatcacaggaggaaccgaaagatacatttgaacatgacccatctgagtctatcgatgaatttaataagtcatcagccacatccggtgatatttggcctggcctttcagcttatgataatagtcctagatcaccccatagtccttcacctattgctacaccacctagtcagagttcatcttgctctgatgctcccatgctcagtacagttcactctgcaaaaaatactccttctcagcattcacattccattcagcatagtcctgaaaggtctgggtctggttctgttggaaatggatctagtcgatacagtccttctcagaatagtccaattcatcacatcccttcacgaagaagtcctgcaaagacaatcgcaccacagaatgctccaagagatgagtctaggggccgttcctcgttttatcctgatggtggagatcaggaaactgcaaagactgggaagttcttaaaaaggttcacagatgaagagtctagagtattcctgcttgataggggtaataccagggataaagaggcttcaaaagagaaaggatcagagaaagggagggcagagggagaatgggaagatcaggaagctctagattacttcagtgataaagagtctggaaaacaaaagtttaatgattcagaaggggatgacacagaggagacagaggattatagacagttcaggaagtcagtcctcgcagatcagggtaaaagttttgctactgcatctcaccggaatactgaggaggaaggactcaagtacaagtccaaagtttcactgaaaggcaatagagaaagtgatggatttagagaagaaaaaaattataaacttaaagagactggatatgtagtggaaaggcctagcactacaaaagataagcacaaagaagaagacaaaaattctgaaagaataacagtaaagaaagaaactcagtcacctgagcaggtaaagtctgaaaagctcaaagacctctttgattacagtccccctctacacaagaatctggatgcacgagaaaagtctaccttcagagaggaaagcccacttaggatcaaaatgatagcgagtgattctcaccgtcctgaagtcaaactcaaaatggcacctgttcctcttgatgattctaacagacctgcttccttgactaaagacaggctgcttgctagtacacttgtccattctgtcaagaaggagcaagaattccgatccatctttgaccacattaagttgccacaggccagcaaaagcacttcagagtcatttattcaacacattgtgtccttggttcatcatgttaaagagcaatacttcaagtcagctgcaatgaccctaaacgagcggttcacttcgtatcagaaagccactgaagaacatagtactcggcaaaagagccctgaaatacacaggagaattgacatctcaccaagtaccctgaggaagcatacccgtttagcaggggaagagagagtttttaaagaagaaaatcaaaagggagataaaaaattaaggtgtgactctgctgaccttcggcatgacattgatcgccgtagaaaagaaagaagtaaagaacggggagattccaagggctccagggaatccagtggatcaagaaagcaggaaaaaactccaaaagattacaaggaatacaaatcttacaaagatgacagtaaacataaaagagagcaagatcattctcgatcttcatcctcttcagcatcaccttcttctcccagttctcgagaagaaaaggagagtaagaaggaaagagaagaagaatttaaaactcaccatgaaatgaaagaatactcaggctttgcaggagttagccgaccacgaggaaccttttttcgaattagaggcagaggaagagccagaggagtttttgctgggacaaatactggtccaaacaactcaaatactacttttcaaaagagaccgaaggaagaggaatgggatccagaatataccccaaagagcaagaagtacttcttgcatgacgacagagatgatggtgtggattattgggccaaaagaggaagaggtcgtggtacttttcaacgtggcagagggcgctttaacttcaaaaaatcaggtagcagtcctaaatggactcatgacaaataccaaggggatgggattgttgaagatgaagaagagaccatggaaaataatgaagaaaagaaggacagacgcaaggaagaaaaggaataa

SEQ ID NO: 22 - DNA, 5166 bp, Homo sapiens
atgctctcagcaacccccctgtatgggaacgttcacagctggatgaacagcgagagggtccgcatgtgtggggcgagcgaagacaggaaaatccttgtaaatgatggtgacgcttcaaaagccagactggaactgagggaagagaatcccttgaaccacaacgtggtggatgcgagcacggcccataggatcgatggcctggcagcactgagcatggaccgcactggcctgatccgggaagggctgcgggtcccgggaaacatcgtctattctagcttgtgtggactgggctcagagaaaggtcgggaggctgccacaagcactctaggtggccttgggttttcttcggaaagaaatccagagatgcagttcaaaccgaatacacccgagacagtggaggcttctgccgtctctggaaaacccccaaatggcttcagtgctatatacaaaacaccgcctggaatacaaaaaagtgctgtagccacagcagaagcgctgggcttggacaggcctgccagcgacaaacagagccctctcaacatcaatggtgctagttatctgcggctgccctgggtcaatccttacatggagggtgccacgccagccatctaccctttcctcgactcgccaaataagtattcactgaacatgtacaaggccttgctacctcagcagtcctacagcttggcccagccgctgtattctccagtctgcaccaatggggagcgctttctctacctgccgccacctcactacgtcggtccccacatcccatcgtccttggcatcacccatgaggctctcgacaccttcggcctccccagccatcccgcctctcgtccattgcgcagacaaaagcctcccgtggaagatgggcgtcagccctgggaatcctgttgattcccacgcctatcctcacatccagaacagtaagcagcccagggttccctctgccaaggcggtcaccagtggcctgccgggggacacagctctcctgttgcccccctcgcctcggccgtcaccccgagtccaccttcccacccagcctgctgcagacacctactcggagttccacaagcactatgccaggatctccacctctccttcagttgccctgtcaaagccatacatgacagttagcagcgagttccccgcggccaggctctccaatggcaagtatcccaaggctccggaagggggcgaaggtgcccagccagtgcccgggcatgcccggaagacagcggttcaagacagaaaagatggcagctcacctcctctgttggagaagcagaccgttaccaaagacgtcacagataagccactagacttgtcttctaaagtggtggatgtagatgcttccaaagctgaccacatgaaaaagatggctcccacggtcctggttcacagcagggctggaagtggcttagtgctctccggaagtgagattccgaaagaaacactatctcctccaggaaatggttgtgctatctatagatctgaaatcatcagcactgctccctcatcctgggtggtgcccgggccaagtcctaacgaagagaacaatggcaaaagcatgtcgctgaaaaacaaggcattggactgggcgataccacagcagcggagttcatcatgcccgcgcatgggcggcaccgatgctgtcatcactaacgtttcagggtcagtgtcgagtgcaggccgcccagcctccgcatcacccgcccccaatgccaatgcagatggcaccaaaaccagcaggagctctgtagaaaccacaccatccgttattcagcacgtgggccagcccccggccactcctgccaagcacagtagcagcaccagcagcaagggcgccaaagccagcaacccagaaccgagtttcaaagcaaacgagaacggccttccaccaagctctatatttctgtctccaaatgaggcattcaggtccccaccaattccctaccccaggagttacctcccttacccagcccctgagggcattgctgtaagtcccctctccttacatggcaaaggacctgtctaccctcacccagttttgttacccaatggcagtctgtttcctgggcaccttgccccaaagcctgggctgccctatgggcttcccaccggccgtccagagtttgtgacctaccaagatgccctggggttgggcatggtgcatcccatgttgataccacacacgcccatagagattactaaagaggagaaaccagagaggagatcccggtcccatgagagagcccgttacgaggacccaaccctccggaatcggttttccgagattttggaaactagcagcaccaagttacatccagatgtccccaccgacaagaacctaaagccgaaccccaactggaatcaagggaagactgttgtcaaaagcgacaagcttgtctacgtagaccttctccgagaagaaccagatgctaaaactgacacaaacgtgtccaaacccagctttgcagcagagagtgttggccagagcgctgagccccccaagccctcagttgagccggccctgcagcagcaccgtgatttcatcgccctgagagaggagttggggcgcatcagtgacttccacgaaacttatactttcaaacagccagtcttcaccgtaagcaaggacagtgttctggcaggtaccaacaaagagaacctagggttgccagtctcgactccattcctggagccacctctggggagcgatggccctgctgtaacttttggtaaaacccaagaggatcccaaaccattttgtgtgggcagtgccccaccaagtgtggatgtgacccccacctataccaaagatggagctgatgaggctgaatcaaatgatggcaaagttctgaaaccgaagccatctaagctggcaaagagaatcgccaactcagcgggttacgtgggtgaccgattcaaatgtgtcactaccgaactgtatgcagattccagtcagctcagccgggagcaacgggcattgcagatggaaggattacaagaggacagtattttatgtctacccgctgcttactgtgagcgtgcaatgatgcgcttctcagagttggagatgaaagaaagagaaggtggccacccagcaaccaaagactccgagatgtgcaaattcagcccagccgactgggaaaggttgaaaggaaatcaggacaaaaagccaaagtcggtcaccctggaggaggccattgcagaacagaacgaaagtgagagatgcgagtatagtgttggaaacaagcaccgtgatccctttgaagccccagaggacaaagatcttcctgtggagaagtactttgtggagaggcagcctgtgagcgagcctcccgcagaccaggtggcctcggacatgcctcacagccccaccctccgggtggacaggaaacgcaaagtctcaggtgacagcagccacactgagaccactgcggaggaggtgccagaggaccctctgctgaaagccaaacgccgacgagtctctaaagggctccatcctaaaaaacaacgccacttgctgcaccttagagaacgatgggagcagcaggtgtcggcagcagatggcaaacctggccggcaaagcaggaaggaagtgacccaggccactcagcctgaggccattcctcaggggactaacatcactgaagagaaacctggcaggaaaagggcagaggccaaaggcaacagaagctggtcggaagagtctcttaaacccagtgacaatgaacaaggcttgcctgtgttctccggctctccgcccatgaagagtctttcatccaccagtgcaggcggcaaaaagcaggctcagccaagctgcgcaccagcctccaggccgcctgccaaacagcagaaaattaaagaaaaccagaagacagatgtgctgtgtgcagacgaagaagaggattgccaggctgcctccctgctgcagaaatacaccgacaacagcgagaagccatccgggaagagactgtgcaaaaccaaacacttgatccctcaggagtccaggcggggattgccactgacaggggaatactacgtggagaatgccgatggcaaggtgactgtccggagattcagaaagcggccggagcccagttcggactatgatctgtcaccagccaagcaggagccaaagcccttcgaccgcttgcagcaactgctaccagcctcccagtccacacagctgccatgctcaagttcccctcaggagaccacccagtctcgccctatgccgccggaagcacggagacttattgtcaataagaacgctggcgagacccttctgcagcgggcagccaggcttggctatgaggaagtggtcctgtactgcttagagaacaagatttgtgatgtaaatcatcgggacaacgcaggttactgcgccctgcatgaagcttgtgctaggggctggctcaacattgtgcgacacctccttgaatatggcgctgatgtcaactgtagtgcccaggatggaaccaggcctctgcacgatgctgttgagaacgatcacttggaaattgtccgactacttctctcttatggtgctgaccccaccttggctacgtactcaggtagaaccatcatgaaaatgacccacagtgaacttatggaaaagttcttaacagattatttaaatgacctccagggtcgcaatgatgatgacgccagtggcacttgggacttctatggcagctctgtttgtgaaccagatgatgaaagtggctatgatgttttagccaaccccccaggaccagaagaccaggatgatgatgacgatgcctatagcgatgtgtttgaatttgaattttcagagacccccctcttaccgtgttataacatccaagtatctgtggctcaggggccacgaaactggctactgctttcggatgtccttaagaaattgaaaatgtcctcccgcatatttcgctgcaattttccaaacgtggaaattgtcaccattgcagaggcagaattttatcggcaggtttctgcaagtctcttgttctcttgctccaaagacctggaagccttcaaccctgaaagtaaggagctgttagatctggtggaattcacgaacgaaattcagactctgctgggctcctctgtagagtggctccaccccagtgatctggcctcagacaactactggtga

SEQ ID NO: 23 - DNA, 2301 bp, Homo sapiens
atggcggcgctgagcggtggcggtggtggcggcgcggagccgggccaggctctgttcaacggggacatggagcccgaggccggcgccggcgccggcgccgcggcctcttcggctgcggaccctgccattccggaggaggtgtggaatatcaaacaaatgattaagttgacacaggaacatatagaggccctattggacaaatttggtggggagcataatccaccatcaatatatctggaggcctatgaagaatacaccagcaagctagatgcactccaacaaagagaacaacagttattggaatctctggggaacggaactgatttttctgtttctagctctgcatcaatggataccgttacatcttcttcctcttctagcctttcagtgctaccttcatctctttcagtttttcaaaatcccacagatgtggcacggagcaaccccaagtcaccacaaaaacctatcgttagagtcttcctgcccaacaaacagaggacagtggtacctgcaaggtgtggagttacagtccgagacagtctaaagaaagcactgatgatgagaggtctaatcccagagtgctgtgctgtttacagaattcaggatggagagaagaaaccaattggttgggacactgatatttcctggcttactggagaagaattgcatgtggaagtgttggagaatgttccacttacaacacacaactttgtacgaaaaacgtttttcaccttagcattttgtgacttttgtcgaaagctgcttttccagggtttccgctgtcaaacatgtggttataaatttcaccagcgttgtagtacagaagttccactgatgtgtgttaattatgaccaacttgatttgctgtttgtctccaagttctttgaacaccacccaataccacaggaagaggcgtccttagcagagactgccctaacatctggatcatccccttccgcacccgcctcggactctattgggccccaaattctcaccagtccgtctccttcaaaatccattccaattccacagcccttccgaccagcagatgaagatcatcgaaatcaatttgggcaacgagaccgatcctcatcagctcccaatgtgcatataaacacaatagaacctgtcaatattgatgacttgattagagaccaaggatttcgtggtgatggaggatcaaccacaggtttgtctgctaccccccctgcctcattacctggctcactaactaacgtgaaagccttacagaaatctccaggacctcagcgagaaaggaagtcatcttcatcctcagaagacaggaatcgaatgaaaacacttggtagacgggactcgagtgatgattgggagattcctgatgggcagattacagtgggacaaagaattggatctggatcatttggaacagtctacaagggaaagtggcatggtgatgtggcagtgaaaatgttgaatgtgacagcacctacacctcagcagttacaagccttcaaaaatgaagtaggagtactcaggaaaacacgacatgtgaatatcctactcttcatgggctattccacaaagccacaactggctattgttacccagtggtgtgagggctccagcttgtatcaccatctccatatcattgagaccaaatttgagatgatcaaacttatagatattgcacgacagactgcacagggcatggattacttacacgccaagtcaatcatccacagagacctcaagagtaataatatatttcttcatgaagacctcacagtaaaaataggtgattttggtctagctacagtgaaatctcgatggagtgggtcccatcagtttgaacagttgtctggatccattttgtggatggcaccagaagtcatcagaatgcaagataaaaatccatacagctttcagtcagatgtatatgcatttggaattgttctgtatgaattgatgactggacagttaccttattcaaacatcaacaacagggaccagataatttttatggtgggacgaggatacctgtctccagatctcagtaaggtacggagtaactgtccaaaagccatgaagagattaatggcagagtgcctcaaaaagaaaagagatgagagaccactctttccccaaattctcgcctctattgagctgctggcccgctcattgccaaaaattcaccgcagtgcatcagaaccctccttgaatcgggctggtttccaaacagaggattttagtctatatgcttgtgcttctccaaaaacacccatccaggcagggggatatggtgcgtttcctgtccactga

SEQ ID NO: 24 - DNA, 5592 bp, Homo sapiens
atggatttatctgctcttcgcgttgaagaagtacaaaatgtcattaatgctatgcagaaaatcttagagtgtcccatctgtctggagttgatcaaggaacctgtctccacaaagtgtgaccacatattttgcaaattttgcatgctgaaacttctcaaccagaagaaagggccttcacagtgtcctttatgtaagaatgatataaccaaaaggagcctacaagaaagtacgagatttagtcaacttgttgaagagctattgaaaatcatttgtgcttttcagcttgacacaggtttggagtatgcaaacagctataattttgcaaaaaaggaaaataactctcctgaacatctaaaagatgaagtttctatcatccaaagtatgggctacagaaaccgtgccaaaagacttctacagagtgaacccgaaaatccttccttgcaggaaaccagtctcagtgtccaactctctaaccttggaactgtgagaactctgaggacaaagcagcggatacaacctcaaaagacgtctgtctacattgaattgggatctgattcttctgaagataccgttaataaggcaacttattgcagtgtgggagatcaagaattgttacaaatcacccctcaaggaaccagggatgaaatcagtttggattctgcaaaaaaggctgcttgtgaattttctgagacggatgtaacaaatactgaacatcatcaacccagtaataatgatttgaacaccactgagaagcgtgcagctgagaggcatccagaaaagtatcagggtagttctgtttcaaacttgcatgtggagccatgtggcacaaatactcatgccagctcattacagcatgagaacagcagtttattactcactaaagacagaatgaatgtagaaaaggctgaattctgtaataaaagcaaacagcctggcttagcaaggagccaacataacagatgggctggaagtaaggaaacatgtaatgataggcggactcccagcacagaaaaaaaggtagatctgaatgctgatcccctgtgtgagagaaaagaatggaataagcagaaactgccatgctcagagaatcctagagatactgaagatgttccttggataacactaaatagcagcattcagaaagttaatgagtggttttccagaagtgatgaactgttaggttctgatgactcacatgatggggagtctgaatcaaatgccaaagtagctgatgtattggacgttctaaatgaggtagatgaatattctggttcttcagagaaaatagacttactggccagtgatcctcatgaggctttaatatgtaaaagtgaaagagttcactccaaatcagtagagagtaatattgaagacaaaatatttgggaaaacctatcggaagaaggcaagcctccccaacttaagccatgtaactgaaaatctaattataggagcatttgttactgagccacagataatacaagagcgtcccctcacaaataaattaaagcgtaaaaggagacctacatcaggccttcatcctgaggattttatcaagaaagcagatttggcagttcaaaagactcctgaaatgataaatcagggaactaaccaaacggagcagaatggtcaagtgatgaatattactaatagtggtcatgagaataaaacaaaaggtgattctattcagaatgagaaaaatcctaacccaatagaatcactcgaaaaagaatctgctttcaaaacgaaagctgaacctataagcagcagtataagcaatatggaactcgaattaaatatccacaattcaaaagcacctaaaaagaataggctgaggaggaagtcttctaccaggcatattcatgcgcttgaactagtagtcagtagaaatctaagcccacctaattgtactgaattgcaaattgatagttgttctagcagtgaagagataaagaaaaaaaagtacaaccaaatgccagtcaggcacagcagaaacctacaactcatggaaggtaaagaacctgcaactggagccaagaagagtaacaagccaaatgaacagacaagtaaaagacatgacagcgatactttcccagagctgaagttaacaaatgcacctggttcttttactaagtgttcaaataccagtgaacttaaagaatttgtcaatcctagccttccaagagaagaaaaagaagagaaactagaaacagttaaagtgtctaataatgctgaagaccccaaagatctcatgttaagtggagaaagggttttgcaaactgaaagatctgtagagagtagcagtatttcattggtacctggtactgattatggcactcaggaaagtatctcgttactggaagttagcactctagggaaggcaaaaacagaaccaaataaatgtgtgagtcagtgtgcagcatttgaaaaccccaagggactaattcatggttgttccaaagataatagaaatgacacagaaggctttaagtatccattgggacatgaagttaaccacagtcgggaaacaagcatagaaatggaagaaagtgaacttgatgctcagtatttgcagaatacattcaaggtttcaaagcgccagtcatttgctccgttttcaaatccaggaaatgcagaagaggaatgtgcaacattctctgcccactctgggtccttaaagaaacaaagtccaaaagtcacttttgaatgtgaacaaaaggaagaaaatcaaggaaagaatgagtctaatatcaagcctgtacagacagttaatatcactgcaggctttcctgtggttggtcagaaagataagccagttgataatgccaaatgtagtatcaaaggaggctctaggttttgtctatcatctcagttcagaggcaacgaaactggactcattactccaaataaacatggacttttacaaaacccatatcgtataccaccactttttcccatcaagtcatttgttaaaactaaatgtaagaaaaatctgctagaggaaaactttgaggaacattcaatgtcacctgaaagagaaatgggaaatgagaacattccaagtacagtgagcacaattagccgtaataacattagagaaaatgtttttaaagaagccagctcaagcaatattaatgaagtaggttccagtactaatgaagtgggctccagtattaatgaaataggttccagtgatgaaaacattcaagcagaactaggtagaaacagagggccaaaattgaatgctatgcttagattaggggttttgcaacctgaggtctataaacaaagtcttcctggaagtaattgtaagcatcctgaaataaaaaagcaagaatatgaagaagtagttcagactgttaatacagatttctctccatatctgatttcagataacttagaacagcctatgggaagtagtcatgcatctcaggtttgttctgagacacctgatgacctgttagatgatggtgaaataaaggaagatactagttttgctgaaaatgacattaaggaaagttctgctgtttttagcaaaagcgtccagaaaggagagcttagcaggagtcctagccctttcacccatacacatttggctcagggttaccgaagaggggccaagaaattagagtcctcagaagagaacttatctagtgaggatgaagagcttccctgcttccaacacttgttatttggtaaagtaaacaatataccttctcagtctactaggcatagcaccgttgctaccgagtgtctgtctaagaacacagaggagaatttattatcattgaagaatagcttaaatgactgcagtaaccaggtaatattggcaaaggcatctcaggaacatcaccttagtgaggaaacaaaatgttctgctagcttgttttcttcacagtgcagtgaattggaagacttgactgcaaatacaaacacccaggatcctttcttgattggttcttccaaacaaatgaggcatcagtctgaaagccagggagttggtctgagtgacaaggaattggtttcagatgatgaagaaagaggaacgggcttggaagaaaataatcaagaagagcaaagcatggattcaaacttaggtgaagcagcatctgggtgtgagagtgaaacaagcgtctctgaagactgctcagggctatcctctcagagtgacattttaaccactcagcagagggataccatgcaacataacctgataaagctccagcaggaaatggctgaactagaagctgtgttagaacagcatgggagccagccttctaacagctacccttccatcataagtgactcttctgcccttgaggacctgcgaaatccagaacaaagcacatcagaaaaagcagtattaacttcacagaaaagtagtgaataccctataagccagaatccagaaggcctttctgctgacaagtttgaggtgtctgcagatagttctaccagtaaaaataaagaaccaggagtggaaaggtcatccccttctaaatgcccatcattagatgataggtggtacatgcacagttgctctgggagtcttcagaatagaaactacccatctcaagaggagctcattaaggttgttgatgtggaggagcaacagctggaagagtctgggccacacgatttgacggaaacatcttacttgccaaggcaagatctagagggaaccccttacctggaatctggaatcagcctcttctctgatgaccctgaatctgatccttctgaagacagagccccagagtcagctcgtgttggcaacataccatcttcaacctctgcattgaaagttccccaattgaaagttgcagaatctgcccagagtccagctgctgctcatactactgatactgctgggtataatgcaatggaagaaagtgtgagcagggagaagccagaattgacagcttcaacagaaagggtcaacaaaagaatgtccatggtggtgtctggcctgaccccagaagaatttatgctcgtgtacaagtttgccagaaaacaccacatcactttaactaatctaattactgaagagactactcatgttgttatgaaaacagatgctgagtttgtgtgtgaacggacactgaaatattttctaggaattgcgggaggaaaatgggtagttagctatttctgggtgacccagtctattaaagaaagaaaaatgctgaatgagcatgattttgaagtcagaggagatgtggtcaatggaagaaaccaccaaggtccaaagcgagcaagagaatcccaggacagaaagatcttcagggggctagaaatctgttgctatgggcccttcaccaacatgcccacagatcaactggaatggatggtacagctgtgtggtgcttctgtggtgaaggagctttcatcattcacccttggcacaggtgtccacccaattgtggttgtgcagccagatgcctggacagaggacaatggcttccatgcaattgggcagatgtgtgaggcacctgtggtgacccgagagtgggtgttggacagtgtagcactctaccagtgccaggagctggacacctacctgataccccagatcccccacagccactactga

SEQ ID NO: 25 - DNA, 753 bp, Homo sapiens
atgagtgcggcggcctcgccggcgtcggagcggggttggaagagcgagaaactagatgaggctcaggccctggcgcggagttgcgccgcccgcagacccgacttccagccgtgcgacgggctgtctatctgtgccacgcacagccatggcaagtgcttcaagctgcactggtgctgtcacctaggatggtgtcactgcaaatacatgtatcagcctatgacccctgtggaacagcttccaagcactgagattcctgccaggcctcgggaacccacaaacaccattcagatctcagtctcgctcaccgaacactttttgaaatttgcatctgtcttccagcctccccttccccctgactcaccgaggtactgtatgatttcagacctttttattgacaactatcaggttaaatgtattaatgggaagatgtgttatgtgcagaagcagccggcaccacattcccacagaatgagccctgaggaggtctctgcacacgatgccttaatttcaaaagagagcaatacaccaaaaatagatcactgctcttctccctcaagttctgaggactctgggatcaatgcgattggggctcactatgtggaatcgtgtgacgaggacacagaagaaggagcagaactgagttcagaggaagattacagtccagagagcagctgggaaccggatgagtgcacccttctctccccctcgcagtctgacctggaagtgattgaaacgatagaaacgactgtgtga

SEQ ID NO: 26 - DNA, 1434 bp, Homo sapiens
atggccaacatgcagggactggtggaaagactggaacgagctgtcagccgcctggagtcgctgtctgcagagtcccacaggccccctgggaactgcggggaagtcaatggtgtcattgcaggtgtggcaccctccgtggaagcctttgacaagctgatggacagtatggtggccgagtttttaaagaacagtaggatccttgctggggacgtggagacccatgcagaaatggtgcacagtgctttccaggcccagcgggctttccttctgatggcctctcagtaccaacaaccccacgagaatgacgtggccgcacttctgaaacccatatcggaaaagattcaggaaatccaaactttcagagagagaaaccgggggagtaacatgtttaatcatctttcggccgtcagcgaaagcatccctgcccttggatggatagctgtgtctcccaaacctggtccttatgtcaaggagatgaatgacgctgccaccttttacactaacagggtcttaaaggactacaaacacagtgatttgcgtcatgtggattgggtgaagtcatatttgaacatttggagtgaacttcaagcatacatcaaggaacaccacaccacgggcctcacatggagcaaaacaggtcctgtagcatccacagtatcagcgttttctgtcctctcctctgggcctggccttcctccaccccctcctcctctgcctcctccagggccacctccacttttcgagaatgaaggcaaaaaagaggaatcttctccttcacgctcagctttatttgcccaacttaaccagggagaagcaattacaaaagggctccgccatgtcacagatgaccagaagacatacaaaaatcccagcctgcgggctcaaggagggcaaactcaatctcccaccaaaagtcacactccaagtcccacatctcctaaatcttatccttctcaaaaacatgccccagtgttggagttggaaggaaagaaatggagagtggagtaccaagaggacaggaatgaccttgtgatttcagagactgagctgaaacaagtggcttacattttcaaatgcgaaaaatcaactattcagataaaagggaaagtaaactccattataattgacaactgtaaaaaactcggcctggtgtttgacaatgtggtgggcattgtggaagtgatcaactcccaggacattcaaatccaggtaatggggagagtgccaacaatttccattaataagacagaaggttgccacatatacctcagtgaagatgcattagactgtgagatcgtgagcgccaagtcatctgaaatgaacatacttatccctcaggatggtgattatagagaatttcccattcctgaacagttcaagacagcatgggatggatccaagttaatcactgaacctgcagaaattatggcctaa

SEQ ID NO: 27 - DNA, 3465 bp, Homo sapiens
atgccaggaggagggccagagatggatgactacatggagacgctgaaggatgaagaggacgccttgtgggagaatgtggagtgtaaccggcacatgctcagccgctatatcaaccctgccaagctcacgccctacctgcgtcagtgtaaggtcattgatgagcaggatgaagatgaagtgcttaatgcccctatgctgccatccaagatcaaccgagcaggccggctgttggacattctacataccaaggggcaaaggggctatgtggtcttcttggagagcctagaattttattacccagaactgtacaaactggtgactgggaaagagcccactcggagattctccaccattgtggtggaggaaggccacgagggcctcacgcacttcctgatgaacgaggtcatcaagctgcagcagcagatgaaggccaaggacctgcaacgctgcgagctgctggccaggttgcggcagctggaggatgagaagaagcagatgacgctgacgcgcgtggagctgctaaccttccaggagcggtactacaagatgaaggaagagcgggacagctacaatgacgagctggtcaaggtgaaggacgacaactacaacttagccatgcgctacgcacagctcagtgaggagaagaacatggcggtcatgaggagccgagacctccaactcgagatcgatcagctaaagcaccggttgaataagatggaggaggaatgtaagctggagagaaatcagtctctaaaactgaagaatgacattgaaaatcggcccaagaaggagcaggttctggaactggagcgggagaatgaaatgctgaagaccaaaaaccaggagctgcagtccatcatccaggccgggaagcgcagcctgccagactcagacaaggccatcctggacatcttggaacacgaccgcaaggaggccctggaggacaggcaggagctggtcaacaggatctacaacctgcaggaggaggcccgccaggcagaggagctgcgagacaagtacctggaggagaaggaggacctggagctcaagtgctcgaccctgggaaaggactgtgaaatgtacaagcaccgcatgaacacggtcatgctgcagctggaggaggtggagcgggagcgggaccaggccttccactcccgagatgaagctcagacacagtactcgcagtgcttaatcgaaaaggacaagtacaggaagcagatccgcgagctggaggagaagaacgacgagatgaggatcgagatggtgcggcgggaggcctgcatcgtcaacctggagagcaagctgcggcgcctctccaaggacagcaacaacctggaccagagtctgcccaggaacctgccagtaaccatcatctctcaggactttggggatgccagccccaggaccaatggtcaagaagctgacgattcttccacctcggaggagtcacctgaagacagcaagtacttcctgccctaccatccgccccagcgcaggatgaacctgaagggcatccagctgcagagagccaaatcccccatcagcctgaagcgaacatcagattttcaagccaaggggcacgaggaagaaggcacggacgccagccctagctcctgcggatctctgcccatcaccaactccttcaccaagatgcagcccccccggagccgcagcagcatcatgtcaatcaccgccgagcccccgggaaacgactccatcgtcagacgctacaaggaggacgcgccccatcgcagcacagtcgaagaagacaatgacagcggcgggtttgacgccttagatctggatgatgacagtcacgaacgctactccttcggaccctcctccatccactcctcctcctcctcccaccaatccgagggcctggatgcctacgacctggagcaggtcaacctcatgttcaggaagttctctctggaaagacccttccggccttcggtcacctctgtggggcacgtgcggggcccagggccctcggtgcagcacacgacgctgaatggcgacagcctcacctcccagctcaccctgctggggggcaacgcgcgagggagcttcgtgcactcggtcaagcctggctctctggccgagaaagccggcctccgtgagggccaccagctgctgctgctagaaggctgcatccgaggcgagaggcagagtgtcccgttggacacatgcaccaaagaggaagcccactggaccatccagaggtgcagcggccccgtcacgctgcactacaaggtcaaccacgaagggtaccggaagctggtgaaggacatggaggacggcctgatcacatcgggggactcgttctacatccggctgaacctgaacatctccagccagctggacgcctgcaccatgtccctgaagtgtgacgatgttgtgcacgtccgtgacaccatgtaccaggacaggcacgagtggctgtgcgcgcgggtcgaccctttcacagaccatgacctggatatgggcaccatacccagctacagccgagcccagcagctcctcctggtgaaactgcagcgcctgatgcaccgaggcagccgggaggaggtagacggcacccaccacaccctgcgggcactccggaacaccctgcagccagaagaagcgctttcaacaagcgacccccgggtcagcccccgtctctcgcgagcaagcttcctttttggccagctccttcagttcgtcagcaggtccgagaacaagtataagcggatgaacagcaacgagcgggtccgcatcatctcggggagtccgctagggagcctggcccggtcctcgctggacgccaccaagctcttgactgagaagcaggaagagctggaccctgagagcgagctgggcaagaacctcagcctcatcccctacagcctggtacgcgccttctactgcgagcgccgccggcccgtgctcttcacacccaccgtgctggccaagacgctggtgcagaggctgctcaactcgggaggtgccatggagttcaccatctgcaagtcagatatcgtcacaagagatgagttcctcagaaggcagaagacggagaccatcatctactcccgagagaagaaccccaacgcgttcgaatgcatcgcccctgccaacattgaagctgtggccgccaagaacaagcactgcctgctggaggctgggatcggctgcacaagagacttgatcaagtccaacatctaccccatcgtgctcttcatccgggtgtgtgagaagaacatcaagaggttcagaaagctgctgccccgacctgagacggaggaggagttcctgcgcgtgtgccggctgaaggagaaggagctggaggccctgccgtgcctgtacgccacggtggaacctgacatgtggggcagcgtagaggagctgctccgcgttgtcaaggacaagatcggcgaggagcagcgcaagaccatctgggtggacgaggaccagctgtga

SEQ ID NO: 28 - DNA, 1617 bp, Homo sapiens
atggagggaggcagaagagccagggtggttattgaaagtaaaagaaacttcttcctgggagcctttcccacccccttccctgctgagcacgtggagttaggcaggttaggggactcggagactgcgatggtgccaggaaagggtggagcggattatattctcctgccttttaaaaagatggacttcagcagaaatctttatgatattggggaacaactggacagtgaagatctggcctccctcaagttcctgagcctggactacattccgcaaaggaagcaagaacccatcaaggatgccttgatgttattccagagactccaggaaaagagaatgttggaggaaagcaatctgtccttcctgaaggagctgctcttccgaattaatagactggatttgctgattacctacctaaacactagaaaggaggagatggaaagggaacttcagacaccaggcagggctcaaatttctgcctacagggtcatgctctatcagatttcagaagaagtgagcagatcagaattgaggtcttttaagtttcttttgcaagaggaaatctccaaatgcaaactggatgatgacatgaacctgctggatattttcatagagatggagaagagggtcatcctgggagaaggaaagttggacatcctgaaaagagtctgtgcccaaatcaacaagagcctgctgaagataatcaacgactatgaagaattcagcaaagagagaagcagcagccttgaaggaagtcctgatgaattttcaaatggggaggagttgtgtggggtaatgacaatctcggactctccaagagaacaggatagtgaatcacagactttggacaaagtttaccaaatgaaaagcaaacctcggggatactgtctgatcatcaacaatcacaattttgcaaaagcacgggagaaagtgcccaaacttcacagcattagggacaggaatggaacacacttggatgcaggggctttgaccacgacctttgaagagcttcattttgagatcaagccccacgatgactgcacagtagagcaaatctatgagattttgaaaatctaccaactcatggaccacagtaacatggactgcttcatctgctgtatcctctcccatggagacaagggcatcatctatggcactgatggacaggaggcccccatctatgagctgacatctcagttcactggtttgaagtgcccttcccttgctggaaaacccaaagtgttttttattcaggcttgtcagggggataactaccagaaaggtatacctgttgagactgattcagaggagcaaccctatttagaaatggatttatcatcacctcaaacgagatatatcccggatgaggctgactttctgctggggatggccactgtgaataactgtgtttcctaccgaaaccctgcagagggaacctggtacatccagtcactttgccagagcctgagagagcgatgtcctcgaggcgatgatattctcaccatcctgactgaagtgaactatgaagtaagcaacaaggatgacaagaaaaacatggggaaacagatgcctcagcctactttcacactaagaaaaaaacttgtcttcccttctgattga

SEQ ID NO: 29 - DNA, 549 bp, Homo sapiens
atgccgcgcgtcgtgcccgaccagagaagcaagttcgagaacgaggagttttttaggaagctgagccgcgagtgtgagattaagtacacgggcttcagggaccggccccacgaggaacgccaggcacgcttccagaacgcctgccgcgacggccgctcggaaatcgcttttgtggccacaggaaccaatctgtctctccagttttttccggccagctggcagggagaacagcgacaaacacctagccgagagtatgtcgacttagaaagagaagcaggcaaggtatatttgaaggctcccatgattctgaatggagtctgtgttatctggaaaggctggattgatctccaaagactggatggtatgggctgtctggagtttgatgaggagcgagcccagcaggaggatgcattagcacaacaggcctttgaagaggctcggagaaggacacgcgaatttgaagatagagacaggtctcatcgggaggaaatggaggtgagagtttcacagctgctggcagtaactggcaagaagacaacaagaccctag

SEQ ID NO: 30 - DNA, 1893 bp, Homo sapiens
atggaagtcaaaggtcagctgatcagctctcctaccttcaatgccccagctgccctgttcggagaggctgccccccaggtgaagtcagagcgtctgcgggggctgcttgaccggcagcggaccctgcaggaggccctgagcctgaaacttcaggagctccgcaaagtgtgtctccaggaggcggagctgactggccagctgccccctgagtgcccactagagcctggtgaacggccccagttggtccgccggcggccccccacagcccgcgcctaccctccaccgcaccccaaccaagcacaccactccttgtgccctgctgaggagctggctcttgaggccctggaacgcgaggtgtcagtgcaacagcagatcgcggcggccgcccgccgcctggccttggcccctgatctgagcaccgagcagcgccggcgccggcgccaggtccaggcagatgcactgaggaggctgcatgagctagaggagcagctcagggatgtccgggcccgccttggcctcccagtgctcccgctgccccagccactgccactgtccacggggtcagtgatcaccacccagggagtctgcctgggcatgcgtcttgctcagctcagccaagaggacgtagttctgcactcagagagcagctccctctcagagtctggggccagccatgacaacgaggagccccatggctgcttctctctggccgagcgcccctcaccacccaaggcttgggaccagctgcgggcagtatctggggggagccctgagcggcgaaccccatggaaaccacctccatcagatctttatggggatctgaagagccggcggaactctgtggccagccccaccagccccacacgctcgctgcccaggagtgcctccagttttgaggggcgaagtgtgcctgccacccctgtcctcacccggggcgctggcccccagctctgcaaacctgaaggccttcattctcgtcagtggtccggcagccaggactcccagatgggcttcccccgggcggaccctgcctccgatcgcgcctccctcttcgtagctcgcacccgccgcagcaacagttctgaggccctgctggtggaccgggccgctggtgggggagctggctccccgcctgcccctctggctccctctgcctctggccccccagtctgcaagagcagtgaggtgctgtatgagcgcccccaaccaacccctgccttctcctcccgcacagcaggccccccagaccctccccgggccgcccggcctagctcagctgcccctgcctcccgaggtgccccccggctcccacctgtgtgtggagacttcctcttggactattccttggaccggggcctgccccgcagtggcggtggaacaggctggggggagctgccgcctgcagctgaggtcccaggacccctctcccgccgggatgggctcctcaccatgctccccggcccaccacctgtgtatgcagctgacagcaacagccccctcctccgcaccaaggacccccacacccgtgccacccgcactaagccctgtggcctgcccccagaggctgccgaaggccctgaggtgcatccaaaccctctgctgtggatgcccccacccacccgtatcccctcggctggtgaacgcagtggccacaagaacctggctctggaggggctgcgggactggtacatccggaactcgggactggctgcggggccccagcgccggcctgtgctcccttccgtgggcccgccacacccacccttcctccatgcccgctgctatgaggtgggccaggcgctgtacggggcccccagccaggcgccactcccacactcgaggagtttcacggcgccccctgtctctggcaggtatggggggtgcttttactga

SEQ ID NO: 31 - DNA, 1425 bp, Homo sapiens
atggcggacagcgccagcgagagcgacacggacggggcggggggcaacagcagcagctcggccgccatgcagtcgtcctgctcgtcgacctcgggcggcggcggtggcggcgggggaggcggcggcggtgggaagtcggggggcattgtcatctcgccgttccgcctggaggagctcaccaaccgcctggcctcgctgcagcaagagaacaaggtgctgaagatagagctggagacctacaaactgaagtgcaaggcactgcaggaggagaaccgcgacctgcgcaaagccagcgtgaccatccaagccagggctgagcaggaagaagaattcattagtaacactttattcaagaaaattcaggctttgcagaaggagaaagaaacccttgctgtaaattatgagaaagaagaagaattcctcactaatgagctctccagaaaattgatgcagttgcagcatgagaaagccgaactagaacagcatcttgaacaagagcaggaatttcaggtcaacaaactgatgaagaaaattaaaaaactggagaatgacaccatttctaagcaacttacattagaacagttgagacgggagaagattgaccttgaaaatacattggaacaagaacaagaagcactagttaatcgcctctggaaaaggatggataagcttgaagctgaaaagcgaatcctgcaggaaaaattagaccagcccgtctctgctccaccatcgcctagagatatctccatggagattgattctccagaaaatatgatgcgtcacatcaggtttttaaagaatgaagtggaacggctgaagaagcaactgagagctgctcagttacagcattcagagaaaatggcacagtatctggaggaggaacgtcacatgagagaagagaacttgaggctccagaggaagctgcagagggagatggagagaagagaagccctctgtcgacagctctccgagagtgagtccagcttagaaatggacgacgaaaggtattttaatgagatgtctgcacaaggattaagacctcgcactgtgtccagcccgatcccttacacaccttctccgagttcaagcaggcctatatcacctggtctatcatatgcaagtcacacggttggtttcacgccaccaacttcactgactagagctggaatgtcttattacaattccccgggtcttcacgtgcagcacatgggaacatcccatggtatcacaaggccttcaccacggagaagcaacagtcctgacaaattcaaacggcccacgccgcctccatctcccaacacacagaccccagtccagccacctccgcctccacctccgccacccatgcagcccacggtcccctcagcagccacctcgcagcctactccttcgcaacattcggcgcacccctcctcccagccttaa

SEQ ID NO: 32 - DNA, 888 bp, Homo sapiens
atggaacaccagctcctgtgctgcgaagtggaaaccatccgccgcgcgtaccccgatgccaacctcctcaacgaccgggtgctgcgggccatgctgaaggcggaggagacctgcgcgccctcggtgtcctacttcaaatgtgtgcagaaggaggtcctgccgtccatgcggaagatcgtcgccacctggatgctggaggtctgcgaggaacagaagtgcgaggaggaggtcttcccgctggccatgaactacctggaccgcttcctgtcgctggagcccgtgaaaaagagccgcctgcagctgctgggggccacttgcatgttcgtggcctctaagatgaaggagaccatccccctgacggccgagaagctgtgcatctacaccgacaactccatccggcccgaggagctgctgcaaatggagctgctcctggtgaacaagctcaagtggaacctggccgcaatgaccccgcacgatttcattgaacacttcctctccaaaatgccagaggcggaggagaacaaacagatcatccgcaaacacgcgcagaccttcgttgccctctgtgccacagatgtgaagttcatttccaatccgccctccatggtggcagcggggagcgtggtggccgcagtgcaaggcctgaacctgaggagccccaacaacttcctgtcctactaccgcctcacacgcttcctctccagagtgatcaagtgtgacccggactgcctccgggcctgccaggagcagatcgaagccctgctggagtcaagcctgcgccaggcccagcagaacatggaccccaaggccgccgaggaggaggaagaggaggaggaggaggtggacctggcttgcacacccaccgacgtgcgggacgtggacatctga

SEQ ID NO: 33 - DNA, 1008 bp, Homo sapiens
atggggtgcctgctgtttctgctgctctgggcgctcctccaggcttggggaagcgctgaagtcccgcaaaggcttttccccctccgctgcctccagatctcgtccttcgccaatagcagctggacgcgcaccgacggcttggcgtggctgggggagctgcagacgcacagctggagcaacgactcggacaccgtccgctctctgaagccttggtcccagggcacgttcagcgaccagcagtgggagacgctgcagcatatatttcgggtttatcgaagcagcttcaccagggacgtgaaggaattcgccaaaatgctacgcttatcctatcccttggagctccaggtgtccgctggctgtgaggtgcaccctgggaacgcctcaaataacttcttccatgtagcatttcaaggaaaagatatcctgagtttccaaggaacttcttgggagccaacccaagaggccccactttgggtaaacttggccattcaagtgctcaaccaggacaagtggacgagggaaacagtgcagtggctccttaatggcacctgcccccaatttgtcagtggcctccttgagtcagggaagtcggaactgaagaagcaagtgaagcccaaggcctggctgtcccgtggccccagtcctggccctggccgtctgctgctggtgtgccatgtctcaggattctacccaaagcctgtatgggtgaagtggatgcggggtgagcaggagcagcagggcactcagccaggggacatcctgcccaatgctgacgagacatggtatctccgagcaaccctggatgtggtggctggggaggcagctggcctgtcctgtcgggtgaagcacagcagtctagagggccaggacatcgtcctctactggggtgggagctacacctccatgggcttgattgccttggcagtcctggcgtgcttgctgttcctcctcattgtgggctttacctcccggtttaagaggcaaacttcctatcagggcgtcctgtga

SEQ ID NO: 34 - DNA, 582 bp, Homo sapiens
atgccggaggagggttcgggctgctcggtgcggcgcaggccctatgggtgcgtcctgcgggctgctttggtcccattggtcgcgggcttggtgatctgcctcgtggtgtgcatccagcgcttcgcacaggctcagcagcagctgccgctcgagtcacttgggtgggacgtagctgagctgcagctgaatcacacaggacctcagcaggaccccaggctatactggcaggggggcccagcactgggccgctccttcctgcatggaccagagctggacaaggggcagctacgtatccatcgtgatggcatctacatggtacacatccaggtgacgctggccatctgctcctccacgacggcctccaggcaccaccccaccaccctggccgtgggaatctgctctcccgcctcccgtagcatcagcctgctgcgtctcagcttccaccaaggttgtaccattgcctcccagcgcctgacgcccctggcccgaggggacacactctgcaccaacctcactgggacacttttgccttcccgaaacactgatgagaccttctttggagtgcagtgggtgcgcccctga

SEQ ID NO: 35 - DNA, 690 bp, Homo sapiens
atggccaggctggcgttgtctcctgtgcccagccactggatggtggcgttgctgctgctgctctcagctgagccagtaccagcagccagatcggaggaccggtaccggaatcccaaaggtagtgcttgttcgcggatctggcagagcccacgtttcatagccaggaaacggggcttcacggtgaaaatgcactgctacatgaacagcgcctccggcaatgtgagctggctctggaagcaggagatggacgagaatccccagcagctgaagctggaaaagggccgcatggaagagtcccagaacgaatctctcgccaccctcaccatccaaggcatccggtttgaggacaatggcatctacttctgtcagcagaagtgcaacaacacctcggaggtctaccagggctgcggcacagagctgcgagtcatgggattcagcaccttggcacagctgaagcagaggaacacgctgaaggatggtatcatcatgatccagacgctgctgatcatcctcttcatcatcgtgcctatcttcctgctgctggacaaggatgacagcaaggctggcatggaggaagatcacacctacgagggcctggacattgaccagacagccacctatgaggacatagtgacgctgcggacaggggaagtgaagtggtctgtaggtgagcacccaggccaggagtga

SEQ ID NO: 36 - DNA, 2475 bp, Homo sapiens
atgacggtgctgcaggaacccgtccaggctgctatatggcaagcactaaaccactatgcttaccgagatgcggttttcctcgcagaacgcctttatgcagaagtacactcagaagaagccttgtttttactggcaacctgttattaccgctcaggaaaggcatataaagcatatagactcttgaaaggacacagttgtactacaccgcaatgcaaatacctgcttgcaaaatgttgtgttgatctcagcaagcttgcagaaggggaacaaatcttatctggtggagtgtttaataagcagaaaagccatgatgatattgttactgagtttggtgattcagcttgctttactctttcattgttgggacatgtatattgcaagacagatcggcttgccaaaggatcagaatgttaccaaaagagccttagtttaaatcctttcctctggtctccctttgaatcattatgtgaaataggtgaaaagccagatcctgaccaaacatttaaattcacatctttacagaactttagcaactgtctgcccaactcttgcacaacacaagtacctaatcatagtttatctcacagacagcctgagacagttcttacggaaacaccccaggacacaattgaattaaacagattgaatttagaatcttccaattcaaagtactccttgaatacagattcctcagtgtcttatattgattcagctgtaatttcacctgatactgtcccactgggaacaggaacttccatattatctaaacaggttcaaaataaaccaaaaactggtcgaagtttattaggaggaccagcagctcttagtccattaaccccaagttttgggattttgccattagaaaccccaagtcctggagatggatcctatttacaaaactacactaatacacctcctgtaattgatgtgccatccaccggagccccttcaaaaaagtctgttgccagaatcggccaaactggaacaaagtctgtcttctcacagagtggaaatagccgagaggtaactccaattcttgcacaaacacaaagttctggtccacaaacaagtacaacacctcaggtattgagccccactattacatctcccccaaacgcactgcctcgaagaagttcacgactctttactagtgacagctccacaaccaaggagaatagcaaaaaattaaaaatgaagtttccacctaaaatcccaaacagaaaaacaaaaagtaaaactaataaaggaggaataactcaacctaacataaatgatagcctggaaattacaaaattggactcttccatcatttcagaagggaaaatatccacaatcacacctcagattcaggcctttaatctacaaaaagcagcagcagaaggtttgatgagccttcttcgtgaaatggggaaaggttatttagctttgtgttcatacaactgcaaagaagctataaatattttgagccatctaccttctcaccactacaatactggttgggtactgtgccaaattggaagggcctattttgaactttcagagtacatgcaagctgaaagaatattctcagaggttagaaggattgagaattatagagttgaaggcatggagatctactctacaacactttggcatcttcaaaaagatgttgctctttcagttctgtcaaaagacttaacagacatggataaaaattcgccagaggcctggtgtgctgcagggaactgtttcagtctgcaacgggaacatgatattgcaattaaattcttccagagagctatccaagttgatccaaattacgcttatgcctatactctattagggcatgagtttgtcttaactgaagaattggacaaagcattagcttgttttcgaaatgctatcagagtcaatcctagacattataatgcatggtatggtttaggaatgatttattacaagcaagaaaaattcagccttgcagaaatgcatttccaaaaagcgcttgatatcaaccctcaaagttcagttttactttgccacattggagtagttcaacatgcactgaaaaaatcagagaaggctttggataccctaaacaaagccattgtcattgatcccaagaaccctctatgcaaatttcacagagcctcagttttatttgcaaatgaaaaatataagtctgctttacaagaacttgaagaattgaaacaaattgttcccaaagaatccctcgtttacttcttaataggaaaggtttacaagaagttaggtcaaacgcacctcgccctgatgaatttctcttgggctatggatttagatcctaaaggagccaataaccagattaaagaggcaattgataagcgttatcttccagatgatgaggagccaataacccaagaagaacagatcatgggaacagatgaatcccaggagagcagcatgacagatgcggatgacacacaacttcatgcagctgaaagtgatgaattttaa

SEQ ID NO: 37 - DNA, 2649 bp, Homo sapiens
atgggcccttggagccgcagcctctcggcgctgctgctgctgctgcaggtctcctcttggctctgccaggagccggagccctgccaccctggctttgacgccgagagctacacgttcacggtgccccggcgccacctggagagaggccgcgtcctgggcagagtgaattttgaagattgcaccggtcgacaaaggacagcctatttttccctcgacacccgattcaaagtgggcacagatggtgtgattacagtcaaaaggcctctacggtttcataacccacagatccatttcttggtctacgcctgggactccacctacagaaagttttccaccaaagtcacgctgaatacagtggggcaccaccaccgccccccgccccatcaggcctccgtttctggaatccaagcagaattgctcacatttcccaactcctctcctggcctcagaagacagaagagagactgggttattcctcccatcagctgcccagaaaatgaaaaaggcccatttcctaaaaacctggttcagatcaaatccaacaaagacaaagaaggcaaggttttctacagcatcactggccaaggagctgacacaccccctgttggtgtctttattattgaaagagaaacaggatggctgaaggtgacagagcctctggatagagaacgcattgccacatacactctcttctctcacgctgtgtcatccaacgggaatgcagttgaggatccaatggagattttgatcacggtaaccgatcagaatgacaacaagcccgaattcacccaggaggtctttaaggggtctgtcatggaaggtgctcttccaggaacctctgtgatggaggtcacagccacagacgcggacgatgatgtgaacacctacaatgccgccatcgcttacaccatcctcagccaagatcctgagctccctgacaaaaatatgttcaccattaacaggaacacaggagtcatcagtgtggtcaccactgggctggaccgagagagtttccctacgtataccctggtggttcaagctgctgaccttcaaggtgaggggttaagcacaacagcaacagctgtgatcacagtcactgacaccaacgataatcctccgatcttcaatcccaccacgtacaagggtcaggtgcctgagaacgaggctaacgtcgtaatcaccacactgaaagtgactgatgctgatgcccccaataccccagcgtgggaggctgtatacaccatattgaatgatgatggtggacaatttgtcgtcaccacaaatccagtgaacaacgatggcattttgaaaacagcaaagggcttggattttgaggccaagcagcagtacattctacacgtagcagtgacgaatgtggtaccttttgaggtctctctcaccacctccacagccaccgtcaccgtggatgtgctggatgtgaatgaagcccccatctttgtgcctcctgaaaagagagtggaagtgtccgaggactttggcgtgggccaggaaatcacatcctacactgcccaggagccagacacatttatggaacagaaaataacatatcggatttggagagacactgccaactggctggagattaatccggacactggtgccatttccactcgggctgagctggacagggaggattttgagcacgtgaagaacagcacgtacacagccctaatcatagctacagacaatggttctccagttgctactggaacagggacacttctgctgatcctgtctgatgtgaatgacaacgcccccataccagaacctcgaactatattcttctgtgagaggaatccaaagcctcaggtcataaacatcattgatgcagaccttcctcccaatacatctcccttcacagcagaactaacacacggggcgagtgccaactggaccattcagtacaacgacccaacccaagaatctatcattttgaagccaaagatggccttagaggtgggtgactacaaaatcaatctcaagctcatggataaccagaataaagaccaagtgaccaccttagaggtcagcgtgtgtgactgtgaaggggccgctggcgtctgtaggaaggcacagcctgtcgaagcaggattgcaaattcctgccattctggggattcttggaggaattcttgctttgctaattctgattctgctgctcttgctgtttcttcggaggagagcggtggtcaaagagcccttactgcccccagaggatgacacccgggacaacgtttattactatgatgaagaaggaggcggagaagaggaccaggactttgacttgagccagctgcacaggggcctggacgctcggcctgaagtgactcgtaacgacgttgcaccaaccctcatgagtgtcccccggtatcttccccgccctgccaatcccgatgaaattggaaattttattgatgaaaatctgaaagcggctgatactgaccccacagccccgccttatgattctctgctcgtgtttgactatgaaggaagcggttccgaagctgctagtctgagctccctgaactcctcagagtcagacaaagaccaggactatgactacttgaacgaatggggcaatcgcttcaagaagctggctgacatgtacggaggcggcgaggacgactag

SEQ ID NO: 38 - DNA, 4473 bp, Homo sapiens
atgcccaattcagagagacatgggggcaagaaggacgggagtggaggagcttctggaactttgcagccgtcatcgggaggcggcagctctaacagcagagagcgtcaccgcttggtatcgaagcacaagcggcataagtccaaacactccaaagacatggggttggtgacccccgaagcagcatccctgggcacagttatcaaacctttggtggagtatgatgatatcagctctgattccgacaccttctccgatgacatggccttcaaactagaccgaagggagaacgacgaacgtcgtggatcagatcggagcgaccgcctgcacaaacatcgtcaccaccagcacaggcgttcccgggacttactaaaagctaaacagaccgaaaaagaaaaaagccaagaagtctccagcaagtcgggatcgatgaaggaccggatatcgggaagttcaaagcgttcgaatgaggagactgatgactatgggaaggcgcaggtagccaaaagcagcagcaaggaatccaggtcatccaagctccacaaggagaagaccaggaaagaacgggagctgaagtctgggcacaaagaccggagtaaaagtcatcgaaaaagggaaacacccaaaagttacaaaacagtggacagcccaaaacggagatccaggagcccccacaggaagtggtctgacagctccaaacaagatgatagcccctcgggagcttcttatggccaagattatgaccttagtccctcacgatctcatacctcgagcaattatgactcctacaagaaaagtcctggaagtacctcgagaaggcagtcggtcagtcccccttacaaggagccttcggcctaccagtccagcacccggtcaccgagcccctacagtaggcgacagagatctgtcagtccctatagcaggagacggtcgtccagctacgaaagaagtggctcttacagcgggcgatcgcccagtccctatggtcgaaggcggtccagcagccctttcctgagcaagcggtctctgagtcggagtccactccccagtaggaaatccatgaagtccagaagtagaagtcctgcatattcaagacattcatcttctcatagtaaaaagaagagatccagttcacgcagtcgtcattccagtatctcacctgtcaggcttccacttaattccagtctgggagctgaactcagtaggaaaaagaaggaaagagcagctgctgctgctgcagcaaagatggatggaaaggagtccaagggttcacctgtatttttgcctagaaaagagaacagttcagtagaggctaaggattcaggtttggagtctaaaaagttacccagaagtgtaaaattggaaaaatctgccccagatactgaactggtgaatgtaacacatctaaacacagaggtaaaaaattcttcagatacagggaaagtaaagttggatgagaactccgagaagcatcttgttaaagatttgaaagcacagggaacaagagactctaaacccatagcactgaaagaggagattgttactccaaaggagacagaaacatcagaaaaggagacccctccacctcttcccacaattgcttctcccccaccccctctaccaactactacccctccacctcagacaccccctttgccacctttgcctccaataccagctcttccacagcaaccacctctgcctccttctcagccagcatttagtcaggttcctgcttccagtacttcaactttgcccccttctactcactcaaagacatctgctgtgtcctctcaggcaaattctcagccccctgtacaggtttctgtgaagactcaagtatctgtaacagctgctattccacacctgaaaacttcaacgttgcctcctttgcccctcccacccttattacctggagatgatgacatggatagtccaaaagaaactcttccttcaaaacctgtgaagaaagagaaggaacagaggacacgtcacttactcacagaccttcctctccctccagagctccctggtggagatctgtctcccccagactctccagaaccaaaggcaatcacaccacctcagcaaccatataaaaagagaccaaaaatttgttgtcctcgttatggagaaagaagacaaacagaaagcgactgggggaaacgctgtgtggacaagtttgacattattgggattattggagaaggaacctatggccaagtatataaagccaaggacaaagacacaggagaactagtggctctgaagaaggtgagactagacaatgagaaagagggcttcccaatcacagccattcgtgaaatcaaaatccttcgtcagttaatccaccgaagtgttgttaacatgaaggaaattgtcacagataaacaagatgcactggatttcaagaaggacaaaggtgccttttaccttgtatttgagtatatggaccatgacttaatgggactgctagaatctggtttggtgcacttttctgaggaccatatcaagtcgttcatgaaacagctaatggaaggattggaatactgtcacaaaaagaatttcctgcatcgggatattaagtgttctaacattttgctgaataacagtgggcaaatcaaactagcagattttggacttgctcggctctataactctgaagagagtcgcccttacacaaacaaagtcattactttgtggtaccgacctccagaactactgctaggagaggaacgttacacaccagccatagatgtttggagctgtggatgtattcttggggaactattcacaaagaagcctatttttcaagccaatctggaactggctcagctagaactgatcagccgactttgtggtagcccttgtccagctgtgtggcctgatgttatcaaactgccctacttcaacaccatgaaaccgaagaagcaatatcgaaggcgtctacgagaagaattctctttcattccttctgcagcacttgatttattggaccacatgctgacactagatcctagtaagcggtgcacagctgaacagaccctacagagcgacttccttaaagatgtcgaactcagcaaaatggctcctccagacctcccccactggcaggattgccatgagttgtggagtaagaaacggcgacgtcagcgacaaagtggtgttgtagtcgaagagccacctccatccaaaacttctcgaaaagaaactacctcagggacaagtactgagcctgtgaagaacagcagcccagcaccacctcagcctgctcctggcaaggtggagtctggggctggggatgcaataggccttgctgacatcacacaacagctgaatcaaagtgaattggcagtgttattaaacctgctgcagagccaaaccgacctgagcatccctcaaatggcacagctgcttaacatccactccaacccagagatgcagcagcagctggaagccctgaaccaatccatcagtgccctgacggaagctacttcccagcagcaggactcagagaccatggccccagaggagtctttgaaggaagcaccctctgccccagtgatcctgccttcagcagaacagacgacccttgaagcttcaagcacaccagctgacatgcagaatatattggcagttctcttgagtcagctgatgaaaacccaagagccagcaggcagtctggaggaaaacaacagtgacaagaacagtgggccacaggggccccgaagaactcccacaatgccacaggaggaggcagcagcatgtcctcctcacattcttccaccagagaagaggccccctgagccccccggacctccaccgccgccacctccaccccctctggttgaaggcgatctttccagcgccccccaggagttgaacccagccgtgacagccgccttgctgcaacttttatcccagcctgaagcagagcctcctggccacctgccacatgagcaccaggccttgagaccaatggagtactccacccgaccccgtccaaacaggacttatggaaacactgatgggcctgaaacagggttcagtgccattgacactgatgaacgaaactctggtccagccttgacagaatccttggtccagaccctggtgaagaacaggaccttctcaggctctctgagccaccttggggagtccagcagttaccagggcacagggtcagtgcagtttccaggggaccaggacctccgttttgccagggtccccttagcgttacacccggtggtcgggcaaccattcctgaaggctgagggaagcagcaattctgtggtacatgcagagaccaaattgcaaaactatggggagctggggccaggaaccactggggccagcagctcaggagcaggccttcactgggggggcccaactcagtcttctgcttatggaaaactctatcgggggcctacaagagtcccaccaagagggggaagagggagaggagttccttactaa

SEQ ID NO: 39 - DNA, 912 bp, Homo sapiens
atggctacctctcgatatgagccagtggctgaaattggtgtcggtgcctatgggacagtgtacaaggcccgtgatccccacagtggccactttgtggccctcaagagtgtgagagtccccaatggaggaggaggtggaggaggccttcccatcagcacagttcgtgaggtggctttactgaggcgactggaggcttttgagcatcccaatgttgtccggctgatggacgtctgtgccacatcccgaactgaccgggagatcaaggtaaccctggtgtttgagcatgtagaccaggacctaaggacatatctggacaaggcacccccaccaggcttgccagccgaaacgatcaaggatctgatgcgccagtttctaagaggcctagatttccttcatgccaattgcatcgttcaccgagatctgaagccagagaacattctggtgacaagtggtggaacagtcaagctggctgactttggcctggccagaatctacagctaccagatggcacttacacccgtggttgttacactctggtaccgagctcccgaagttcttctgcagtccacatatgcaacacctgtggacatgtggagtgttggctgtatctttgcagagatgtttcgtcgaaagcctctcttctgtggaaactctgaagccgaccagttgggcaaaatctttgacctgattgggctgcctccagaggatgactggcctcgagatgtatccctgccccgtggagcctttccccccagagggccccgcccagtgcagtcggtggtacctgagatggaggagtcgggagcacagctgctgctggaaatgctgacttttaacccacacaagcgaatctctgcctttcgagctctgcagcactcttatctacataaggatgaaggtaatccggagtga

SEQ ID NO: 40 - DNA, 495 bp, Homo sapiens
atgtcagaaccggctggggatgtccgtcagaacccatgcggcagcaaggcctgccgccgcctcttcggcccagtggacagcgagcagctgagccgcgactgtgatgcgctaatggcgggctgcatccaggaggcccgtgagcgatggaacttcgactttgtcaccgagacaccactggagggtgacttcgcctgggagcgtgtgcggggccttggcctgcccaagctctaccttcccacggggccccggcgaggccgggatgagttgggaggaggcaggcggcctggcacctcacctgctctgctgcaggggacagcagaggaagaccatgtggacctgtcactgtcttgtacccttgtgcctcgctcaggggagcaggctgaagggtccccaggtggacctggagactctcagggtcgaaaacggcggcagaccagcatgacagatttctaccactccaaacgccggctgatcttctccaagaggaagccctaa

SEQ ID NO: 41 - DNA, 597 bp, Homo sapiens
atgtcaaacgtgcgagtgtctaacgggagccctagcctggagcggatggacgccaggcaggcggagcaccccaagccctcggcctgcaggaacctcttcggcccggtggaccacgaagagttaacccgggacttggagaagcactgcagagacatggaagaggcgagccagcgcaagtggaatttcgattttcagaatcacaaacccctagagggcaagtacgagtggcaagaggtggagaagggcagcttgcccgagttctactacagacccccgcggccccccaaaggtgcctgcaaggtgccggcgcaggagagccaggatgtcagcgggagccgcccggcggcgcctttaattggggctccggctaactctgaggacacgcatttggtggacccaaagactgatccgtcggacagccagacggggttagcggagcaatgcgcaggaataaggaagcgacctgcaaccgacgattcttctactcaaaacaaaagagccaacagaacagaagaaaatgtttcagacggttccccaaatgccggttctgtggagcagacgcccaagaagcctggcctcagaagacgtcaaacgtaa

SEQ ID NO: 42 - DNA, 399 bp, Homo sapiens
atggtgcgcaggttcttggtgaccctccggattcggcgcgcgtgcggcccgccgcgagtgagggttttcgtggttcacatcccgcggctcacgggggagtgggcagcgccaggggcgcccgccgctgtggccctcgtgctgatgctactgaggagccagcgtctagggcagcagccgcttcctagaagaccaggtcatgatgatgggcagcgcccgagtggcggagctgctgctgctccacggcgcggagcccaactgcgccgaccccgccactctcacccgacccgtgcacgacgctgcccgggagggcttcctggacacgctggtggtgctgcaccgggccggggcgcggctggacgtgcgcgatgcctggggccgtctgcccgtggacctggctga

SEQ ID NO: 43 - DNA, 1077 bp, Homo sapiens
atggagtcggccgacttctacgaggcggagccgcggcccccgatgagcagccacctgcagagccccccgcacgcgcccagcagcgccgccttcggctttccccggggcgcgggccccgcgcagcctcccgccccacctgccgccccggagccgctgggcggcatctgcgagcacgagacgtccatcgacatcagcgcctacatcgacccggccgccttcaacgacgagttcctggccgacctgttccagcacagccggcagcaggagaaggccaaggcggccgtgggccccacgggcggcggcggcggcggcgactttgactacccgggcgcgcccgcgggccccggcggcgccgtcatgcccgggggagcgcacgggcccccgcccggctacggctgcgcggccgccggctacctggacggcaggctggagcccctgtacgagcgcgtcggggcgccggcgctgcggccgctggtgatcaagcaggagccccgcgaggaggatgaagccaagcagctggcgctggccggcctcttcccttaccagccgccgccgccgccgccgccctcgcacccgcacccgcacccgccgcccgcgcacctggccgccccgcacctgcagttccagatcgcgcactgcggccagaccaccatgcacctgcagcccggtcaccccacgccgccgcccacgcccgtgcccagcccgcaccccgcgcccgcgctcggtgccgccggcctgccgggccctggcagcgcgctcaaggggctgggcgccgcgcaccccgacctccgcgcgagtggcggcagcggcgcgggcaaggccaagaagtcggtggacaagaacagcaacgagtaccgggtgcggcgcgagcgcaacaacatcgcggtgcgcaagagccgcgacaaggccaagcagcgcaacgtggagacgcagcagaaggtgctggagctgaccagtgacaatgaccgcctgcgcaagcgggtggaacagctgagccgcgaactggacacgctgcggggcatcttccgccagctgccagagagctccttggtcaaggccatgggcaactgcgcgtga

SEQ ID NO: 44 - DNA, 5718 bp, Homo sapiens
atggcgtcgggcctgggctccccgtccccctgctcggcgggcagtgaggaggaggatatggatgcacttttgaacaacagcctgcccccaccccacccagaaaatgaagaggacccagaagaggatttgtcagaaacagagactccaaagctcaagaagaagaaaaagcctaagaaacctcgggaccctaaaatccctaagagcaagcgccaaaaaaaggagctgggggacagctctggggaggggccagagtttgtggaggaggaggaagaggtggctctgcgctcagacagtgagggcagcgactatactcctggcaagaagaagaagaagaagcttggacctaagaaagagaagaagagcaaatccaagcggaaggaggaggaggaggaggaggatgatgatgatgattcaaaggagcctaaatcatctgctcagctcctggaagactggggcatggaagacattgaccacgtgttctcagaggaggattatcgaaccctcaccaactacaaggccttcagccagtttgtcagacccctcattgctgccaaaaatcccaagattgctgtctccaagatgatgatggttttgggtgcaaaatggcgggagttcagtaccaataaccccttcaaaggcagttctggggcatcagtggcagctgcggcagcagcagcggtagctgtggtggagagcatggtgacagccactgaggttgcaccaccacctccccctgtggaggtgcctatccgcaaggccaagaccaaggagggcaaaggtcccaatgctcggaggaagcccaagggcagccctcgtgtacctgatgccaagaagcctaaacccaagaaagtagctcccctgaaaatcaagctgggaggttttggttccaagcgtaagagatcctcgagtgaggatgatgacttagatgtggaatctgacttcgatgatgccagtatcaatagctattctgtttctgatggttccaccagccgtagtagccgcagccgcaagaaactccgaaccactaaaaagaaaaagaaaggcgaggaggaggtgactgctgtggatggttatgagacagaccaccaggactattgcgaggtgtgccagcaaggcggtgagatcatcctgtgtgatacctgtccccgtgcttaccacatggtctgcctggatcccgacatggagaaggctcccgagggcaagtggagctgcccacactgcgagaaggaaggcatccagtgggaagctaaagaggacaattcggagggtgaggagatcctggaagaggttgggggagacctcgaagaggaggatgaccaccatatggaattctgtcgggtctgcaaggatggtggggaactgctctgctgtgatacctgtccttcttcctaccacatccactgcctgaatcccccacttccagagatccccaacggtgaatggctctgtccccgttgtacgtgtccagctctgaagggcaaagtgcagaagatcctaatctggaagtggggtcagccaccatctcccacaccagtgcctcggcctccagatgctgatcccaacacgccctccccaaagcccttggaggggcggccagagcggcagttctttgtgaaatggcaaggcatgtcttactggcactgctcctgggtttctgaactgcagctggagctgcactgtcaggtgatgttccgaaactatcagcggaagaatgatatggatgagccaccttctggggactttggtggtgatgaagagaaaagccgaaagcgaaagaacaaggaccctaaatttgcagagatggaggaacgcttctatcgctatgggataaaacccgagtggatgatgatccaccgaatcctcaaccacagtgtggacaagaagggccacgtccactacttgatcaagtggcgggacttaccttacgatcaggcttcttgggagagtgaggatgtggagatccaggattacgacctgttcaagcagagctattggaatcacagggagttaatgaggggtgaggaaggccgaccaggcaagaagctcaagaaggtgaagcttcggaagttggagaggcctccagaaacgccaacagttgatccaacagtgaagtatgagcgacagccagagtacctggatgctacaggtggaaccctgcacccctatcaaatggagggcctgaattggttgcgcttctcctgggctcagggcactgacaccatcttggctgatgagatgggccttgggaaaactgtacagacagcagtcttcctgtattccctttacaaggagggtcattccaaaggccccttcctagtgagcgcccctctttctaccatcatcaactgggagcgggagtttgaaatgtgggctccagacatgtatgtcgtaacctatgtgggtgacaaggacagccgtgccatcatccgagagaatgagttctcctttgaagacaatgccattcgtggtggcaagaaggcctcccgcatgaagaaagaggcatctgtgaaattccatgtgctgctgacatcctatgaattgatcaccattgacatggctattttgggctctattgattgggcctgcctcatcgtggatgaagcccatcggctgaagaacaatcagtctaagttcttccgggtattgaatggttactcactccagcacaagctgttgctgactgggacaccattacaaaacaatctggaagagttgtttcatctgctcaactttctcacccccgagaggttccacaatttggaaggttttttggaggagtttgctgacattgccaaggaggaccagataaaaaaactgcatgacatgctggggccgcacatgttgcggcggctcaaagccgatgtgttcaagaacatgccctccaagacagaactaattgtgcgtgtggagctgagccctatgcagaagaaatactacaagtacatcctcactcgaaattttgaagcactcaatgcccgaggtggtggcaaccaggtgtctctgctgaatgtggtgatggatcttaagaagtgctgcaaccatccatacctcttccctgtggctgcaatggaagctcctaagatgcctaatggcatgtatgatggcagtgccctaatcagagcatctgggaaattattgctgctgcagaaaatgctcaagaaccttaaggagggtgggcatcgtgtactcatcttttcccagatgaccaagatgctagacctgctagaggatttcttggaacatgaaggttataaatacgaacgcatcgatggtggaatcactgggaacatgcggcaagaggccattgaccgcttcaatgcaccgggtgctcagcagttctgcttcttgctttccactcgagctgggggccttggaatcaatctggccactgctgacacagttattatctatgactctgactggaacccccataatgacattcaggcctttagcagagctcaccggattgggcaaaataaaaaggtaatgatctaccggtttgtgacccgtgcgtcagtggaggagcgcatcacgcaggtggcaaagaagaaaatgatgctgacgcatctagtggtgcggcctgggctgggctccaagactggatctatgtccaaacaggagcttgatgatatcctcaaatttggcactgaggaactattcaaggatgaagccactgatggaggaggagacaacaaagagggagaagatagcagtgttatccactacgatgataaggccattgaacggctgctagaccgtaaccaggatgagactgaagacacagaattgcagggcatgaatgaatatttgagctcattcaaagtggcccagtatgtggtacgggaagaagaaatgggggaggaagaggaggtagaacgggaaatcattaaacaggaagaaagtgtggatcctgactactgggagaaattgctgcggcaccattatgagcagcagcaagaagatctagcccgaaatctgggcaaaggaaaaagaatccgtaaacaggtcaactacaatgatggctcccaggaggaccgagattggcaggacgaccagtccgacaaccagtccgattactcagtggcttcagaggaaggtgatgaagactttgatgaacgttcagaagctccccgtaggcccagtcgtaagggcctgcggaatgataaagataagccattgcctcctctgttggcccgtgttggtgggaatattgaagtacttggttttaatgctcgtcagcgaaaagcctttcttaatgcaattatgcgatatggtatgccacctcaggatgcttttactacccagtggcttgtaagagacctgcgaggcaaatcagagaaagagttcaaggcatatgtctctcttttcatgcggcatttatgtgagccgggggcagatggggctgagacctttgctgatggtgtcccccgagaaggcctgtctcgccagcatgtccttactagaattggtgttatgtctttgattcgcaagaaggttcaggagtttgaacatgttaatgggcgctggagcatgcctgaactggctgaggtggaggaaaacaagaagatgtcccagccagggtcaccctccccaaaaactcctacaccctccactccaggggacacgcagcccaacactcctgcacctgtcccacctgctgaagatgggataaaaatagaggaaaatagcctcaaagaagaagagagcatagaaggagaaaaggaggttaaatctacagcccctgagactgccattgagtgtacacaggcccctgcccctgcctcagaggatgaaaaggtcgttgttgaaccccctgagggagaggagaaagtggaaaaggcagaggtgaaggagagaacagaggaacctatggagacagagcccaaaggtgctgctgatgtagagaaggtggaggaaaagtcagcaatagatctgacccctattgtggtagaagacaaagaagagaagaaagaagaagaagagaaaaaagaggtgatgcttcagaatggagagacccccaaggacctgaatgatgagaaacagaagaaaaatattaaacaacgtttcatgtttaacattgcagatggtggttttactgagttgcactccctttggcagaatgaagagcgggcagccacagttaccaagaagacttatgagatctggcatcgacggcatgactactggctgctagccggcattataaaccatggctatgcccggtggcaagacatccagaatgacccacgctatgccatcctcaatgagcctttcaagggtgaaatgaaccgtggcaatttcttagagatcaagaataaatttctagctcgaaggtttaagctcttagaacaagctctggtgattgaggaacagctgcgccgggctgcttacttgaacatgtcagaagacccttctcacccttccatggccctcaacacccgctttgctgaggtggagtgtttggcggaaagtcatcagcacctgtccaaggagtcaatggcaggaaacaagccagccaatgcagtcctgcacaaagttctgaaacagctggaagaactgctgagtgacatgaaagctgatgtgactcgactcccagctaccattgcccgaattcccccagttgctgtgaggttacagatgtcagagcgtaacattctcagccgcctggcaaaccgggcacccgaacctaccccacagcaggtagcccagcagcagtga

SEQ ID NO: 45 - DNA, 7746 bp, Homo sapiens
atggcagaccccatcatggatctgttcgatgacccaaatttatttggcctggactctctgactgatgacagctttaaccaggtcacacaagaccccattgaggaagcccttggactgccaagctctctggactccttggatcagatgaaccaggatggtggaggtggtgatgtggggaattcatcagcaagtgaactggtccctccaccagaggaaacagctcccacagaactttccaaagaatccacagctccagctccagaatccataaccttgcatgattataccactcagcctgccagccaggagcagccagcccaacctgtcttacagacatcgacgccaacatcaggacttttgcaagtctccaagagccaggagatcctgagccaagggaatcctttcatgggtgtctctgccacagctgtctcctccagtagtgctggagggcagccacctcagtcagcccctaagattgttatccttaaggccccaccaagctcctcagtcactggtgcccatgtggcacaaattcaggcccaaggtatcaccagcacagctcagcccctggtggcaggcacagccaatggtggaaaagtcacttttaccaaagtgctaaccggcacaccccttcgaccaggtgtttccattgtctctggtaatacagtgttggccgccaaggtccctgggaaccaggctgctgttcagcgcattgtccagcccagccgaccagtaaagcagctggtcctccagccagttaagggttcagctcctgctggaaaccctggggccacagggcccccactgaagcctgcagttacactgacctctacacctacccagggtgaatcgaaacgcatcaccctggtcctccagcagccacagtctggaggtccccaaggacatcggcatgttgtgctagggagtctaccaggcaagatagtgttacagggcaaccagctggcagccctgactcaagccaagaatgcccaagggcagcctgccaaggtagtaactatccagctgcaggtgcagcagccacagcaaaaaatccagattgtaccacaaccaccatcatcgcagccacagccccagcagccaccctccacccagccagtgactctgtcctctgtacagcaggctcagataatgggaccaggacaaagcccaggacaaagactttcagtaccagtcaaggtggtactgcagccacaggctggctcttcccaaggggcctcttctgggctctctgtagttaaagttctgagtgccagtgaagtggcagctttgtcatcaccagcaagctctgctcctcattcggggggaaagacaggaatggaggaaaaccgcagattggaacaccagaagaagcaagagaaagcaaatcggattgtagcagaggccattgcgagagcccgtgcccgcggtgagcagaacatacctcgagtcttaaatgaggacgagttgcccagcgttcggccagaggaggaaggcgagaagaaacgcaggaagaagagtgctggggagaggctgaaagaggagaagccaaagaagagtaaaacatctggtgcctccaaaacaaagggcaagagcaagctcaacaccatcactcctgtagtgggtaagaagagaaaacgtaatacctcatctgataattcagatgtggaagtcatgcctgcacagtcacctcgagaagatgaagaaagcagcattcagaagagacgctcaaaccgccaagttaagcgaaaaaaatatacagaggacctggatataaagatcacagatgatgaagaagaagaagaggtggatgtaactggtccaataaaacctgagcctatcctccctgaaccagtgcaagaaccagatggcgagactttgccttccatgcagttctttgtggagaatcccagtgaagaagatgcagccattgtagacaaagtgctttctatgcggattgtgaagaaggagctcccttctggacaatatactgaagcagaagaattctttgtcaagtacaagaactactcctatctgcattgtgaatgggctactatctcccaactagagaaggataagaggatacatcaaaaattaaagcgcttcaaaaccaaaatggctcagatgagacacttcttccatgaggatgaagagccctttaatccagactacgtagaggtggataggatattggatgagtctcacagtattgacaaggacaatggggagcccgttatttactacctggtgaaatggtgctctctgccctatgaggatagcacatgggagctaaaagaagatgttgatgagggcaagattcgagaatttaaacggattcagtcaaggcacccagaactcaaaagggtgaatcgtccgcaggcaagtgcctggaagaaattggagctatcacatgaatataaaaacagaaaccagctacgggaatatcagttggaaggggttaattggctgctctttaattggtataacaggcagaactgcatcctggctgatgagatgggattgggcaaaactattcagtccattgccttcttgcaggaagtatataatgtgggcatccatggtcccttcttggtcattgccccactgtccacaattactaactgggagcgagaatttaatacatggacagaaatgaacactattgtgtaccatggcagtctggccagcaggcagatgattcaacagtatgaaatgtactgcaaagattcacggggacgcctcatcccaggcgcatacaagtttgacgctctgatcaccacttttgagatgattttgtcagattgtcctgagcttcgtgaaattgaatggcgttgtgttatcattgatgaagcccatcgactgaaaaaccgtaattgcaagctgcttgatagtctcaagcacatggacctggaacacaaggtgctactcacaggaacaccattgcaaaatactgtagaagaactgtttagcttgcttcatttcttggaaccgtcacaatttccctcagaatcagagtttctcaaggactttggggatctcaagacagaggaacaggttcaaaagctacaggccattcttaagccaatgatgctgagaagactcaaagaggatgttgaaaaaaacttggcacccaaacaggaaacaattattgaagtagagctgactaatatccagaagaaatactatcgggctattttggagaagaatttctccttcctttccaaaggggcaggtcataccaacatgcctaatctacttaacacaatgatggagttgcgcaagtgctgcaaccacccatatctcatcaatggtgctgaagaaaaaatcctaacagaattccgtgaagcttgccatattatacctcatgactttcacctgcaggccatggttcgttcagccggcaaactggttcttattgacaagttgcttccaaagcttaaagctggtggccataaagttctgatcttctctcagatggtgcgctgcctagacatcctagaggattatttaatccagaggaggtacttatatgaacgtattgatgggcgagttagaggcaaccttcgacaggctgccattgaccgcttcagcaagcctgactcagaccgctttgtcttcttactgtgtacccgggctggtggacttggtattaatcttacagctgctgatacctgcatcatctttgattcagactggaatccacaaaatgacctgcaggcccaggcacgatgtcatcgaattgggcagagcaaagctgtgaaggtgtaccgcctcatcactcgtaattcctacgagagagagatgtttgataaggccagcctcaagttggggttggataaggctgtgcttcaatccatgagtggtcgggatggcaacattactggaatccaacagttctctaagaaggagattgaagatcttttaagaaaaggagcatatgcagccatcatggaggaagatgatgaaggctccaagttttgtgaagaggacattgaccagatcttgttaagacgaactacaaccatcaccattgaatctgaaggaaaaggttccacctttgctaaggcaagctttgttgcttctgaaaacaggacagatatttctttggatgaccccaacttttggcaaaagtgggccaaaaaggctgacctagacatggatctgctcaacagcaagaataatttggtaattgacacacctagagtacgaaaacaaacgcgccactttagcactctgaaagatgatgacctggtggaattctctgatttggaaagtgaggatgatgagcggccacgctcccgcagacatgaccgtcatcatgcctatgggcgcactgactgctttcgggtggaaaagcatctcctggtatatggttggggacgatggcgagatattttatctcatggacgcttcaagcgacgtatgactgaacgagatgtggagaccatttgtcgggccattctcgtgtactgtcttctacactaccgtggggatgaaaatattaaaggcttcatctgggacttgattagcccagctgaaaatggcaagacaaaagaattgcagaatcattcaggtctatctatccctgtgcctcgtggacgcaaaggaaaaaaagtaaagtcacaaagcacttttgatatccataaggcagattggatccggaaatataaccctgacactttgttccaagatgaaagttataagaagcacttgaaacatcagtgtaacaaggtactgttgcgggtacgaatgctatactacctgaggcaggaggttattggagaccaagcagaaaaggtgttagggggtgcgattgccagtgagattgacatatggttcccagtagtggatcaactggaggttccaacaacttggtgggacagtgaggctgacaagtcgctgctcattggagtctttaaacatggctatgagaaatataataccatgagggcagacccagccttatgtttcctagaaaaggctggccgaccagatgacaaagcaattgcagcagaacatcgagtgttggataacttctctgacatagtagaaggggttgactttgataaagattgtgaagatcctgaatataaaccactccaaggtcccccaaaggaccaagatgatgagggtgatcccttgatgatgatggatgaggagatctcagtgattgatggagatgaagcccaggtgacccaacagccaggccatttattctggcctccgggctctgccctaacagctaggcttcggcgtctagtaacagcgtatcagcgcagctacaagagagaacaaatgaagatagaggctgcagaacgtggggaccggcgaaggcggcgttgtgaagcagccttcaagctgaaagaaattgcacggcgggagaaacaacaacgatggacaaggcgtgaacaaactgatttttatcgagtggtgtctacgtttggtgtggaatatgaccctgacaccatgcagttccattgggatcgcttccgcacttttgctcgactagacaaaaagacagatgaaagccttaccaagtacttccatggctttgtggccatgtgccgccaagtatgccgccttcccccagcagctggagatgaaccccccgaccctaacctgttcattgagcccatcactgaggagagagcctcacggactctctaccgtatagaattgcttcggcgcttacgggaacaagttttatgccacccccttttggaagatcggctggcattgtgtcagcctcctggtcctgaattgcccaaatggtgggagcctgttcggcatgatggggagcttctaagaggggcagcccgccatggggtgagccaaacagactgcaacatcatgcaggacccagacttctcttttctggctgcccgtatgaattatatgcagaaccatcaagcaggagcaccagctccatccttgtcacgctgctctactccactgctgcaccagcagtatacctcacgcactgcctcaccactgcccctgcgcccagatgctcctgttgaaaagtcacccgaggagacagctacccaggtccccagtctggagagtctgactttaaagctagagcacgaggtggtggccaggagccgaccaaccccacaagactatgagatgcgagtatccccctctgatactacccctctggtttcccggagtgttccaccagtcaaactggaggatgaggatgattcggactctgagctggacttgagcaagctgtcaccatcttcttcttcttcctcatcctcatccagctccagctccagcactgatgagagtgaggatgagaaggaagagaagctaactgaccagtcccgctcaaagctctatgatgaagagagtctcctgtccctcactatgtcccaagatggattcccaaatgaagatggagaacaaatgacccctgagcttctgctactgcaggaaagacaaagagcctctgagtggcccaaggatcgtgtcctgataaaccgtattgacctcgtctgccaggctgtactctcagggaagtggccttctagccgtaggagccaggaaatggtaacaggaggaattttggggccaggcaaccacttgctagacagtccctcattgactcctggagaatatggtgactctccagtccccacaccacgaagtagtagtgcagcttccatggcagaggaggaagcatctgcagtcagcacagcggcagcccagttcaccaaacttcgccgaggcatggatgaaaaggagtttacagttcaaatcaaagatgaggaaggattgaagttaacattccagaagcacaagttgatggcgaatggagtaatgggagatggacatccactgtttcataagaagaaggggaacagaaagaagctagtagagctggaggtggagtgcatggaagagcctaatcaccttgatgtggacctggagacccggatccctgtcatcaataaggtggatggtactttgctggtgggtgaggatgcccctcgccgggctgaactggagatgtggttacagggtcatccagagtttgctgttgatccccgatttctagcgtatatggaggatcgcagaaaacagaagtggcaaagatgtaaaaaaaataataaggcagaattgaactgtttgggaatggaaccagtacagacagctaactctagaaatgggaaaaagggtcatcacactgaaacggtgttcaaccgggttttgccagggcctattgcaccagagagcagcaagaagcgggcccgtaggatgcgaccagacctttctaagatgatggccctcatgcagggtggaagcactgggtctctatctctgcataacacgttccaacacagcagtagtggcctacagtctgtgtcatctttgggtcacagcagtgccacttctgcatctttgccttttatgccatttgtgatgggtggtgcaccatcatcccctcatgtagactccagcaccatgcttcatcaccaccaccaccacccccacccccaccatcaccaccatcaccatccaggcttgagagcccctggctacccctcttcaccagtgactaccgcctctggtactaccttgcggttgccaccactgcaacctgaggaggatgacgatgaggatgaagaagatgatgatgacttatctcagggctatgatagctcagaaagggacttctcactcattgatgatcctatgatgccagctaactcagactccagtgaagatgctgatgactga

SEQ ID NO: 46 - DNA, 1311 bp, Homo sapiens
atgccgatgtcttctcttccagcagctattttgtctcacatgacagctattaacaatgtgcctcctcctccacttcacagtataccaaacttgaaaaagtctaagcacattaattatggccagttgaatgcattatgccacattagaggacaacacagccggagtatgagcaatatcttatcagctcacgatacatttatgaagcaatatcctaaagtattcctgcaccaaaaacccagacttcctaaacttttcaaacaggaggaacaaagggaactcaatgaaggcaaagaggaaagtcaacatcaacaacctgatgattctaacaatatagctgtccatgttcagagagcacatggtggccatattttatatagaccaaaaagagccacagagaaatttgaagaattcctagctatcttaaagaaattgcccattcacaggacgccatatgaacacaaaactgtgtggaagttcctgaaaacaattccagatttaacctttcagctaaatgataagcatctgaaaacacttagtaagactgtcttttccgaaacctggttgaaaggcagcacagtggttgcaaatgatggattttatgtaatactgaaaggcctagctcgacctcaaacaaacgtgtataaaaatctgattgaaggaagtgattcaccagactcgttcatatctcagagtttccacagcttcatttggagtgaagaattcaaaaactctacacttgctgagatgtacctaccttcatatgactcaatgcttagcaaatggagtacctttgggactctggaagttatgcctcagaatgaatcggaaacacagatgttctcggtggtgacagaagacgattgtgaaattcttaaaatcccagcaaagggatatgcaaagataaaggaggaaaaaataaaacttgaaaatatgcaaaagttgaaattaatccgtatgtgtccttattatgaggaatggcctactttatccatatatgagctaattgcactccttaaatggaaaaaatttcctccaggtcatgtgatagtggaaagtggaaatataatttcttttgtgggttatattaactctggatgctgtaacatttatagaagtattataggatttgtgaaactacgatcaaataaagtgaaaagatctcaaaaacttgtttatatggggaaacttaaggagaaggagtcctttggtgagattagcgtccttcttcaagttcctttcacgtgcacaatcattaccaaaaaagaagttgagatggcaatcattgaagataaggacctatttgtggcctag

SEQ ID NO: 47 - DNA, 5517 bp, Homo sapiens
atggacgtccatacccgctggaaagcgcgcagcgcgctccgcccgggcgccccgctgctgcccccgctgctgctgctgctgctgtgggcgccgcctccgagccgcgcagctcagccagcagatctcctgaaggttctagattttcacaacttgcctgatggaataacaaagacaacaggcttttgcgccacgcggcgatcttccaaaggcccggatgtcgcttacagagtcaccaaagacgcgcagctcagcgcacccaccaagcagctgtaccctgcgtctgcatttcccgaggacttctccatcctaacaactgtgaaagccaagaaaggcagccaggccttcctggtctccatctacaacgagcagggtatccagcagattgggctggagctgggccgctctcccgtcttcctctacgaggaccacacggggaagcctggcccggaagactaccccctcttccggggcatcaacctgtcagatggcaagtggcacagaattgctctcagcgtccacaagaaaaatgtcaccttgatcctcgactgtaaaaagaagaccaccaaattcctcgaccgcagcgaccaccccatgatcgacatcaatggcatcatcgtgtttggcacccggatcctggatgaggaggtgtttgagggtgacatccagcagctgctctttgtctcggaccaccgggcagcttatgattactgtgagcactacagccctgactgtgacaccgcagtacctgacaccccacagtcgcaggaccccaatccagatgaatattacacggaaggagacggcgagggtgagacctattactacgaatacccctactacgaagaccccgaagacctagggaaggagcccacccccagcaagaagcccgtggaagctgccaaagaaaccacagaggtccccgaggagctgaccccgacccccacggaagctgctcccatgcctgaaaccagtgaaggggctgggaaggaagaggacgtcggcatcggggactatgactacgtgcccagtgaggactactacacgccctcaccgtatgatgacctcacctatggcgagggggaggagaaccccgaccagcccacagacccaggcgctggggccgaaattcccaccagcaccgccgacacctccaactcctccaatccagctccgcctccaggggaaggtgcggatgacttggagggggagttcactgaggaaacgatccggaaccttgacgagaactactacgacccctactacgaccccaccagctccccgtcggagatcgggccgggaatgccggcgaaccaggataccatctatgaagggattggaggacctcggggcgagaaaggccaaaagggagaaccagcgattatcgagccgggcatgctcatcgagggcccgcctggcccagaaggccccgcgggtcttcccggacctccaggaaccatgggtcccactggccaagtcggggaccctggagaaaggggcccccctggacgcccaggccttcctggggccgatggcctgcccggtcctccaggaaccatgctcatgctgcccttccggtttggaggtggcggcgatgcgggctccaaaggccccatggtctcagcccaggagtcccaggcgcaagccattctccagcaggccaggttggcactgaggggaccagctggcccgatgggtctcacagggagacctggccctgtgggtccccctgggagcggaggtttgaagggcgagccgggagacgtggggcctcagggtcctcgaggtgtgcaaggcccgcctggtccggccgggaagcccggaagacggggtcgggctgggagtgatggagccagaggaatgcctggacaaactggccccaagggtgaccggggtttcgacggcctggctgggttgccaggcgagaagggccacaggggtgaccctggtccttccggcccaccaggacctccgggagacgatggagaaaggggtgacgacggagaagttgggcccagggggctgcctggggagcccgggccacgtggtctgcttgggccgaaggggcccccaggtcctcccggacctcccggtgtcacgggtatggacggccagccggggccaaaaggaaatgtgggtccccagggagagcctggccccccaggacagcagggtaatccaggcgcccagggtcttccaggcccccagggtgcaattggtcctccaggagaaaagggtcccttggggaaaccaggccttccaggaatgcccggtgctgacggacccccgggacaccctggcaaagaaggccctccaggagagaaaggaggtcagggtccacctggcccccagggtccgattggctacccaggtcctcgaggagtcaagggggccgatggcatccgtggtctgaagggcacaaagggcgagaagggtgaagacggctttcctgggtttaaaggagacatgggcatcaagggtgatcggggggagatcggcccacccggtcccaggggagaagatggccctgaaggcccaaagggtcgcggaggtcccaatggtgaccccggtcctctgggaccccctggggagaagggaaaactcggagtcccagggttaccagggtatccaggaagacaaggaccaaagggctctattggattccctggatttcctggcgccaatggagagaagggcggcagggggacccctggaaagccaggaccgcgggggcagcgaggcccaacgggtccgaggggtgaaagaggcccccggggcatcactgggaagcctggccccaagggcaactccggaggtgacggcccagctggccctcctggtgaacggggacccaatggaccccaaggacccacaggatttcctggaccaaagggcccccctggccctccaggcaaggatggactcccaggacaccctggacagagaggcgagactggtttccaaggcaagaccggccctccaggcccccccggcgtggtcggccctcagggtcccacgggagaaacgggcccaatgggtgagcgtggccaccctgggccccctggaccccccggtgaacaggggcttccgggccttgctggaaaagaagggacgaagggtgacccaggccctgcaggcctccctgggaaagatggccctccaggattacgtggtttccctggggaccgagggcttcctggtccagtgggagctcttggactgaaaggcaatgaagggccccctggcccaccaggccctgcgggatctccaggggagagaggtccagctggagccgctgggcccatcggaattccagggagacctgggccccagggacccccagggccggcaggagagaaaggggctcctggcgagaaaggcccacaaggcccagctggccgagacggtctccaggggcctgtggggctcccgggtccagctggccctgtgggtccccctggagaagacggagataagggagagatcggggagccggggcagaaaggaagcaagggggacaaaggagaacagggtcctcctgggcctacaggtcctcaaggccccatcggacagccaggcccctctggagctgacggcgagccggggcctcggggccagcagggccttttcgggcagaaaggtgatgaaggtcccagaggctttcctggaccccctgggccagtggggctgcagggtttgccaggacctccaggcgagaagggtgagacaggagacgtgggccagatgggccccccgggtccccctggcccccgaggaccctccggagctccaggtgctgatggcccacaaggtcccccaggtggaataggaaaccctggtgcagtgggagagaagggcgagcctggcgaagcaggtgagcctggccttccgggagaaggcggccccccgggacccaaaggagaaaggggagagaagggcgagtcaggcccttcaggtgctgccggaccccctggacccaaaggccctcccggagatgatggtcccaaaggcagccctggcccagtgggttttcctggagatcctggcccccccggagagcctggccccgcgggtcaagatggtccccctggtgacaaaggagatgatggtgaacccgggcagacgggatcccccggccctactggtgaaccaggtccatcggggcctccaggaaaaaggggtcccccaggccccgcaggccccgaaggcagacagggagagaaaggggccaagggagaagccggcttggaaggccctcctgggaagactggccccatcggcccccagggggcccctgggaagcccggaccggatggccttcgagggatccctggccctgtgggagaacaaggtctcccaggatccccaggcccggacggtccccccggccccatgggtcccccaggacttcccggcctcaaaggagattctggtcccaaaggtgaaaagggtcatccaggcctgatcgggctcatcggtcctccgggtgaacagggtgagaagggcgaccgtggtctccctggcccccagggctcctccggtcctaagggagaacagggtatcactggtccttctggcccgattgggcctcctgggccccctggcctgccgggtccgcctggtccaaaaggtgctaagggctcctcgggtccaactggcccgaagggtgaggcaggccacccaggacccccaggccccccgggccccccgggagaggtcatccagcccctgccaatccaggcatccaggacgcggcggaacatcgacgccagccagctgctggacgacgggaatggcgagaactacgtggactacgcggacggcatggaagagatcttcggctctctcaactctctgaagctggagattgagcagatgaaacggcccctgggcacgcagcagaaccccgcccgcacctgcaaggacctgcagctctgccaccccgacttcccagatggtgaatactgggtcgatcctaaccaaggatgctccagggattccttcaaggtttactgcaacttcacagccggggggtcgacatgcgtcttccctgacaagaagtccgaaggggccagaatcacttcttggcccaaagaaaacccgggctcctggttcagtgaattcaagcgtgggaaactgctctcctatgtggacgccgagggcaaccctgtgggtgtggtacagatgaccttcctgcggctgctgagcgcctctgcccaccagaacgtcacctaccactgctaccagtcagtggcctggcaggacgcagccacgggcagctacgacaaggccctccgcttcctgggctccaacgacgaggagatgtcctatgacaacaacccctacatccgcgccctggtggacggctgtgctaccaagaaaggctaccagaagacggttctggagatcgacacccccaaagtggagcaggtgcccatcgtggacatcatgttcaatgacttcggtgaagcgtcacagaaatttggatttgaagtggggccggcttgcttcatgggctag

SEQ ID NO: 48 - DNA, 5238 bp, Homo sapiens
atggggaaccgccgggacctgggccagccgcgggccggtctctgcctgctcctggccgcgctgcagcttctgccggggacgcaggccgatcctgtggatgtcctgaaggccctgggtgtgcagggaggccaggctggggtccccgaggggcctggcttctgtccccagaggactccagagggtgaccgggcattcagaattggccaggccagcacgctcggcatccccacgtgggaactctttccagaaggccactttcctgagaacttctccttgctgatcaccttgcggggacagccagccaatcagtctgtcctgctgtccatttatgatgaaaggggtgcccggcagttgggcctggcactggggccagcgctgggtctcctaggtgaccccttccgccccctcccccagcaggtcaacctcacagatggcaggtggcaccgtgtggccgtcagcatagatggtgagatggtgaccctggtagctgactgtgaagctcagccccctgttttgggccatggcccccgcttcatcagcatagctggactcactgtgctggggacccaggaccttggggaaaagactttcgagggagacattcaggagctgctgataagcccagatcctcaggctgccttccaggcttgtgagcggtacctccccgactgtgacaacctggcaccggcagccacagtggctccccagggtgaaccagaaacccctcgtcctcggcggaaggggaagggaaaagggaggaagaaagggcgaggtcgcaaggggaagggcaggaaaaagaacaaggaaatttggacctcaagtccacctcctgactccgcagagaaccagacctccactgacatccccaagacagagactccagctccaaatctgcctccgacccccacgcctttggtcgtcacctccactgtgactactggactcaatgccacgatcctagagaggagcttggaccctgacagtggaaccgagctggggaccctggagaccaaggcagccagggaggatgaagaaggagatgattccaccatgggccctgacttccgggcagcagaatatccatctcggactcagttccagatctttcctggtgctggagagaaaggagcaaaaggagagcccgcagtgattgaaaaggggcagcagtttgagggacctccaggagccccaggaccccaaggggtggttggcccctcaggccctcccggccccccaggattccctggcgaccctggtccaccgggccctgctggcctcccaggaatccccggcattgatgggatccgaggcccaccgggcactgtgatcatgatgccgttccagtttgcaggcggctcctttaaaggccccccagtctcattccagcaggcccaggctcaggcagttctgcagcagactcagctctctatgaaaggcccccctggtccagtggggctcactgggcgcccaggccctgtgggtctccccgggcatccaggtctgaaaggagaggagggagcagaagggccacagggtccccgaggcctgcagggacctcatggaccccctggccgagtgggcaagatgggccgccctggagcagatggagctcggggcctcccaggggacactggacctaagggtgatcgtggcttcgatggcctccctgggctgcctggtgagaagggccaaaggggtgactttggccatgtggggcaacccggtcccccaggagaggatggtgagaggggagcagagggacctccagggcccactggccaggctggggagccgggtccacgaggactgcttggccccagaggctctcctggccccacgggtcgcccgggtgtgactggaattgatggtgctcctggtgccaaaggcaatgtgggtcctccaggagaaccaggccctccgggacagcagggaaaccatgggtcccagggactccccggtccccagggactcattggcactcctggggagaagggtccccctggaaacccaggaattccaggcctcccaggatccgatggccctctgggtcacccaggacatgagggccccacgggagagaaaggggctcagggtccaccagggtcggcaggccctccgggctatcctggacctcggggagtgaagggcacttcaggcaaccggggcctccagggggagaaaggcgagaagggagaggacggcttcccaggcttcaagggcgatgtggggctcaaaggtgatcaggggaaacccggagctccaggtccccggggagaggatggtcctgaggggccgaaggggcaggcggggcaggctggcgaggaggggcccccaggctcagctggggagaagggcaagcttggggtgccaggcctcccaggttatccaggacgccctggacctaagggatctattggatttcccggtcccctgggacccataggagagaaagggaagtcgggaaagacagggcagccaggcctggaaggagagcggggaccaccaggttcccgtggagagagggggcaaccgggtgccacagggcaaccaggccccaagggcgatgtgggccaggatggagcccctgggatccctggagaaaagggcctccctggtctgcaaggccctccaggattccctgggccaaagggcccccctggtcaccaaggtaaagatgggcgaccagggcaccctggacagagaggagaactgggcttccaaggtcagacaggcccgcctggaccagctggtgtcttaggccctcagggaaagacaggagaagtgggacctctaggtgaaagggggcctccaggcccccctggacctcctggtgaacaaggtcttcctggcctggaaggcagagagggggccaagggggaactgggaccaccaggaccccttgggaaagaagggccagctggactcaggggctttcccggccccaaagggggccctggggacccgggacctactggcttaaagggtgataagggccccccagggcccgtgggggccaatggctcccctggtgagcgcggtcctttgggcccagcaggaggcattggacttcctggccaaagtggcagcgaaggccccgttggccctgcaggcaagaaggggtcccggggagaacgtggcccccctggccccactggcaaagatgggatcccagggcccctggggcctctgggaccccctggagctgctgggccttctggcgaggaaggggacaagggggatgtgggtgcccccggacacaaggggagtaaaggcgataaaggagacgcgggcccacctggacaaccagggatacggggtcctgcaggacacccaggtcccccgggagcagacggggctcaggggcgccggggacccccaggcctctttgggcagaaaggagatgacggagtcagaggctttgtgggggtgattggccctcctggactgcaggggctgccaggccctccgggagagaaaggggaggtcggagacgtcgggtccatgggtccccatggagctccaggtcctcggggtccccaaggccccactggatcagagggcactccagggctgcctggaggagttggtcagccaggcgccgtgggtgagaagggtgagcgaggggacgctggagacccagggcctccaggagccccaggcatcccggggcccaagggagacattggtgaaaagggggactcaggcccatctggagctgctggacccccaggcaagaaaggtccccctggagaggatggagccaaagggagcgtgggccccacggggctgcccggagatctagggcccccaggagaccctggagtttcaggcatagatggttccccaggggagaagggagaccctggtgatgttgggggaccgggtccgcctggagcttctggggagcccggcgcccccgggccccccggcaagaggggtccttcaggccacatgggtcgagaaggcagagaaggggagaaaggtgccaagggggagccaggtcctgatgggcccccagggaggacgggtccaatgggggctagagggccccctggacgtgtggggcctgagggtcttcgagggatccctggccctgtgggtgaaccaggcctcctgggagcccctggacagatgggccctcctggccccctggggccctctggcctcccagggctgaagggagacactggccccaagggggaaaagggccacattggattgatcggtctcattggccccccgggagaagctggtgagaaaggagatcaggggttgccaggcgtgcagggaccccctggtcccaagggagaccctggtccccctggtcccattggctctctgggccaccctgggcccccaggtgtggcgggccctctaggacagaaaggctcaaaagggtctccggggtccatgggcccccgtggagacactggacctgcaggcccaccaggccccccgggtgcccctgccgagctgcatgggctgcgcaggcgccggcgcttcgtcccagtcccgcttccagtcgtggagggcggcctggaggaggtgctggcctcgctcacatcgctgagcttggagctggagcagctgcggcgtcctcccggcactgcggagcgcccgggcctcgtgtgccacgagctgcaccgcaaccacccgcacctgcctgatggggaatactggattgaccccaaccagggctgcgcgcgggactcgttcagggttttttgcaacttcacggcgggaggagagacctgcctctatcccgacaagaagtttgagatcgtgaaattggcctcctggtccaaggaaaagcctggaggctggtatagcacattccgtcgagggaagaagttctcctacgtggacgccgacgggtccccagtgaatgtcgtgcagctgaacttcctgaaactgctgagtgccacagctcgccagaacttcacctactcctgccagaatgcagctgcctggctggacgaagccacgggtgactacagccactccgcccgcttccttggcaccaatggagaggagctgtctttcaaccagacgacagcagccactgtcagcgtcccccaggatggctgccggctccggaaaggacagacgaagacccttttcgaattcagctcttctcgagcgggatttctgcccctgtgggatgtggcggccactgactttggccagacgaaccaaaagtttgggtttgaactgggccccgtctgcttcagcagctga

SEQ ID NO: 49 - DNA, 7329 bp, Homo sapiens
atggctgagaacttgctggacggaccgcccaaccccaaaagagccaaactcagctcgcccggtttctcggcgaatgacagcacagattttggatcattgtttgacttggaaaatgatcttcctgatgagctgatacccaatggaggagaattaggccttttaaacagtgggaaccttgttccagatgctgcttccaaacataaacaactgtcggagcttctacgaggaggcagcggctctagtatcaacccaggaataggaaatgtgagcgccagcagccccgtgcagcagggcctgggtggccaggctcaagggcagccgaacagtgctaacatggccagcctcagtgccatgggcaagagccctctgagccagggagattcttcagcccccagcctgcctaaacaggcagccagcacctctgggcccacccccgctgcctcccaagcactgaatccgcaagcacaaaagcaagtggggctggcgactagcagccctgccacgtcacagactggacctggtatctgcatgaatgctaactttaaccagacccacccaggcctcctcaatagtaactctggccatagcttaattaatcaggcttcacaagggcaggcgcaagtcatgaatggatctcttggggctgctggcagaggaaggggagctggaatgccgtaccctactccagccatgcagggcgcctcgagcagcgtgctggctgagaccctaacgcaggtttccccgcaaatgactggtcacgcgggactgaacaccgcacaggcaggaggcatggccaagatgggaataactgggaacacaagtccatttggacagccctttagtcaagctggagggcagccaatgggagccactggagtgaacccccagttagccagcaaacagagcatggtcaacagtttgcccaccttccctacagatatcaagaatacttcagtcaccaacgtgccaaatatgtctcagatgcaaacatcagtgggaattgtacccacacaagcaattgcaacaggccccactgcagatcctgaaaaacgcaaactgatacagcagcagctggttctactgcttcatgctcataagtgtcagagacgagagcaagcaaacggagaggttcgggcctgctcgctcccgcattgtcgaaccatgaaaaacgttttgaatcacatgacgcattgtcaggctgggaaagcctgccaagttgcccattgtgcatcttcacgacaaatcatctctcattggaagaactgcacacgacatgactgtcctgtttgcctccctttgaaaaatgccagtgacaagcgaaaccaacaaaccatcctggggtctccagctagtggaattcaaaacacaattggttctgttggcacagggcaacagaatgccacttctttaagtaacccaaatcccatagaccccagctccatgcagcgagcctatgctgctctcggactcccctacatgaaccagccccagacgcagctgcagcctcaggttcctggccagcaaccagcacagcctcaaacccaccagcagatgaggactctcaaccccctgggaaataatccaatgaacattccagcaggaggaataacaacagatcagcagcccccaaacttgatttcagaatcagctcttccgacttccctgggggccacaaacccactgatgaacgatggctccaactctggtaacattggaaccctcagcactataccaacagcagctcctccttctagcaccggtgtaaggaaaggctggcacgaacatgtcactcaggacctgcggagccatctagtgcataaactcgtccaagccatcttcccaacacctgatcccgcagctctaaaggatcgccgcatggaaaacctggtagcctatgctaagaaagtggaaggggacatgtacgagtctgccaacagcagggatgaatattatcacttattagcagagaaaatctacaagatacaaaaagaactagaagaaaaacggaggtcgcgtttacataaacaaggcatcttggggaaccagccagccttaccagccccgggggctcagccccctgtgattccacaggcacaacctgtgagacctccaaatggacccctgtccctgccagtgaatcgcatgcaagtttctcaagggatgaattcatttaaccccatgtccttggggaacgtccagttgccacaagcacccatgggacctcgtgcagcctccccaatgaaccactctgtccagatgaacagcatgggctcagtgccagggatggccatttctccttcccgaatgcctcagcctccgaacatgatgggtgcacacaccaacaacatgatggcccaggcgcccgctcagagccagtttctgccacagaaccagttcccgtcatccagcggggcgatgagtgtgggcatggggcagccgccagcccaaacaggcgtgtcacagggacaggtgcctggtgctgctcttcctaaccctctcaacatgctggggcctcaggccagccagctaccttgccctccagtgacacagtcaccactgcacccaacaccgcctcctgcttccacggctgctggcatgccatctctccagcacacgacaccacctgggatgactcctccccagccagcagctcccactcagccatcaactcctgtgtcgtcttccgggcagactcccaccccgactcctggctcagtgcccagtgctacccaaacccagagcacccctacagtccaggcagcagcccaggcccaggtgaccccgcagcctcaaaccccagttcagcccccgtctgtggctacccctcagtcatcgcagcaacagccgacgcctgtgcacgcccagcctcctggcacaccgctttcccaggcagcagccagcattgataacagagtccctaccccctcctcggtggccagcgcagaaaccaattcccagcagccaggacctgacgtacctgtgctggaaatgaagacggagacccaagcagaggacactgagcccgatcctggtgaatccaaaggggagcccaggtctgagatgatggaggaggatttgcaaggagcttcccaagttaaagaagaaacagacatagcagagcagaaatcagaaccaatggaagtggatgaaaagaaacctgaagtgaaagtagaagttaaagaggaagaagagagtagcagtaacggcacagcctctcagtcaacatctccttcgcagccgcgcaaaaaaatctttaaaccagaggagttacgccaggccctcatgccaaccctagaagcactgtatcgacaggacccagagtcattacctttccggcagcctgtagatccccagctcctcggaattccagactattttgacatcgtaaagaatcccatggacctctccaccatcaagcggaagctggacacagggcaataccaagagccctggcagtacgtggacgacgtctggctcatgttcaacaatgcctggctctataatcgcaagacatcccgagtctataagttttgcagtaagcttgcagaggtctttgagcaggaaattgaccctgtcatgcagtcccttggatattgctgtggacgcaagtatgagttttccccacagactttgtgctgctatgggaagcagctgtgtaccattcctcgcgatgctgcctactacagctatcagaataggtatcatttctgtgagaagtgtttcacagagatccagggcgagaatgtgaccctgggtgacgacccttcacagccccagacgacaatttcaaaggatcagtttgaaaagaagaaaaatgataccttagaccccgaacctttcgttgattgcaaggagtgtggccggaagatgcatcagatttgcgttctgcactatgacatcatttggccttcaggttttgtgtgcgacaactgcttgaagaaaactggcagacctcgaaaagaaaacaaattcagtgctaagaggctgcagaccacaagactgggaaaccacttggaagaccgagtgaacaaatttttgcggcgccagaatcaccctgaagccggggaggtttttgtccgagtggtggccagctcagacaagacggtggaggtcaagcccgggatgaagtcacggtttgtggattctggggaaatgtctgaatctttcccatatcgaaccaaagctctgtttgcttttgaggaaattgacggcgtggatgtctgcttttttggaatgcacgtccaagaatacggctctgattgcccccctccaaacacgaggcgtgtgtacatttcttatctggatagtattcatttcttccggccacgttgcctccgcacagccgtttaccatgagatccttattggatatttagagtatgtgaagaaattagggtatgtgacagggcacatctgggcctgtcctccaagtgaaggagatgattacatcttccattgccacccacctgatcaaaaaatacccaagccaaaacgactgcaggagtggtacaaaaagatgctggacaaggcgtttgcagagcggatcatccatgactacaaggatattttcaaacaagcaactgaagacaggctcaccagtgccaaggaactgccctattttgaaggtgatttctggcccaatgtgttagaagagagcattaaggaactagaacaagaagaagaggagaggaaaaaggaagagagcactgcagccagtgaaaccactgagggcagtcagggcgacagcaagaatgccaagaagaagaacaacaagaaaaccaacaagaacaaaagcagcatcagccgcgccaacaagaagaagcccagcatgcccaacgtgtccaatgacctgtcccagaagctgtatgccaccatggagaagcacaaggaggtcttcttcgtgatccacctgcacgctgggcctgtcatcaacaccctgccccccatcgtcgaccccgaccccctgctcagctgtgacctcatggatgggcgcgacgccttcctcaccctcgccagagacaagcactgggagttctcctccttgcgccgctccaagtggtccacgctctgcatgctggtggagctgcacacccagggccaggaccgctttgtctacacctgcaacgagtgcaagcaccacgtggagacgcgctggcactgcactgtgtgcgaggactacgacctctgcatcaactgctataacacgaagagccatgcccataagatggtgaagtgggggctgggcctggatgacgagggcagcagccagggcgagccacagtcaaagagcccccaggagtcacgccggctgagcatccagcgctgcatccagtcgctggtgcacgcgtgccagtgccgcaacgccaactgctcgctgccatcctgccagaagatgaagcgggtggtgcagcacaccaagggctgcaaacgcaagaccaacgggggctgcccggtgtgcaagcagctcatcgccctctgctgctaccacgccaagcactgccaagaaaacaaatgccccgtgcccttctgcctcaacatcaaacacaagctccgccagcagcagatccagcaccgcctgcagcaggcccagctcatgcgccggcggatggccaccatgaacacccgcaacgtgcctcagcagagtctgccttctcctacctcagcaccgcccgggacccccacacagcagcccagcacaccccagacgccgcagccccctgcccagccccaaccctcacccgtgagcatgtcaccagctggcttccccagcgtggcccggactcagccccccaccacggtgtccacagggaagcctaccagccaggtgccggcccccccacccccggcccagccccctcctgcagcggtggaagcggctcggcagatcgagcgtgaggcccagcagcagcagcacctgtaccgggtgaacatcaacaacagcatgcccccaggacgcacgggcatggggaccccggggagccagatggcccccgtgagcctgaatgtgccccgacccaaccaggtgagcgggcccgtcatgcccagcatgcctcccgggcagtggcagcaggcgccccttccccagcagcagcccatgccaggcttgcccaggcctgtgatatccatgcaggcccaggcggccgtggctgggccccggatgcccagcgtgcagccacccaggagcatctcacccagcgctctgcaagacctgctgcggaccctgaagtcgcccagctcccctcagcagcaacagcaggtgctgaacattctcaaatcaaacccgcagctaatggcagctttcatcaaacagcgcacagccaagtacgtggccaatcagcccggcatgcagccccagcctggcctccagtcccagcccggcatgcaaccccagcctggcatgcaccagcagcccagcctgcagaacctgaatgccatgcaggctggcgtgccgcggcccggtgtgcctccacagcagcaggcgatgggaggcctgaacccccagggccaggccttgaacatcatgaacccaggacacaaccccaacatggcgagtatgaatccacagtaccgagaaatgttacggaggcagctgctgcagcagcagcagcaacagcagcagcaacaacagcagcaacagcagcagcagcaagggagtgccggcatggctgggggcatggcggggcacggccagttccagcagcctcaaggacccggaggctacccaccggccatgcagcagcagcagcgcatgcagcagcatctccccctccagggcagctccatgggccagatggcggctcagatgggacagcttggccagatggggcagccggggctgggggcagacagcacccccaacatccagcaagccctgcagcagcggattctgcagcaacagcagatgaagcagcagattgggtccccaggccagccgaaccccatgagcccccagcaacacatgctctcaggacagccacaggcctcgcatctccctggccagcagatcgccacgtcccttagtaaccaggtgcggtctccagcccctgtccagtctccacggccccagtcccagcctccacattccagcccgtcaccacggatacagccccagccttcgccacaccacgtctcaccccagactggttccccccaccccggactcgcagtcaccatggccagctccatagatcagggacacttggggaaccccgaacagagtgcaatgctcccccagctgaacacccccagcaggagtgcgctgtccagcgaactgtccctggtcggggacaccacgggggacacgctagagaagtttgtggagggcttgtag

SEQ ID NO: 50 - DNA, 2184 bp, Homo sapiens
atggaaggtgatgcagtcgaagccattgtggaggagtccgaaacttttattaaaggaaaggagagaaagacttaccagagacgccgggaagggggccaggaagaagatgcctgccacttaccccagaaccagacggatgggggtgaggtggtccaggatgtcaacagcagtgtacagatggtgatgatggaacagctggaccccacccttcttcagatgaagactgaagtaatggagggcacagtggctccagaagcagaggctgctgtggacgatacccagattataactttacaggttgtaaatatggaggaacagcccataaacataggagaacttcagcttgttcaagtacctgttcctgtgactgtacctgttgctaccacttcagtagaagaacttcagggggcttatgaaaatgaagtgtctaaagagggccttgcggaaagtgaacccatgatatgccacaccctacctttgcctgaagggtttcaggtggttaaagtgggggccaatggagaggtggagacactagaacaaggggaacttccaccccaggaagatcctagttggcaaaaagacccagactatcagccaccagccaaaaaaacaaagaaaaccaaaaagagcaaactgcgttatacagaggagggcaaagatgtagatgtgtctgtctacgattttgaggaagaacagcaggagggtctgctatcagaggttaatgcagagaaagtggttggtaatatgaagcctccaaagccaacaaaaattaaaaagaaaggtgtaaagaagacattccagtgtgagctttgcagttacacgtgtccacggcgttcaaatttggatcgtcacatgaaaagccacactgatgagagaccacacaagtgccatctctgtggcagggcattcagaacagtcaccctcctgaggaatcaccttaacacacacacaggtactcgtcctcacaagtgcccagactgcgacatggcctttgtgaccagtggagaattggttcggcatcgtcgttacaaacacacccacgagaagccattcaagtgttccatgtgcgattacgccagtgtagaagtcagcaaattaaaacgtcacattcgctctcatactggagagcgtccgtttcagtgcagtttgtgcagttatgccagcagggacacatacaagctgaaaaggcacatgagaacccattcaggggaaaagccttatgaatgttatatttgtcatgctcggtttacccaaagtggtaccatgaagatgcacattttacagaagcacacagaaaatgtggccaaatttcactgtccccactgtgacacagtcatagcccgaaaaagtgatttgggtgtccacttgcgaaagcagcattcctatattgagcaaggcaagaaatgccgttactgtgatgctgtgtttcatgagcgctatgccctcatccagcatcagaagtcacacaagaatgagaagcgctttaagtgtgaccagtgtgattacgcttgtagacaggagaggcacatgatcatgcacaagcgcacccacaccggggagaagccttacgcctgcagccactgcgataagaccttccgccagaagcagcttctcgacatgcacttcaagcgctatcacgaccccaacttcgtccctgcggcttttgtctgttctaagtgtgggaaaacatttacacgtcggaataccatggcaagacatgctgataattgtgctggcccagatggcgtagagggggaaaatggaggagaaacgaagaagagtaaacgtggaagaaaaagaaagatgcgctctaagaaagaagattcctctgacagtgaaaatgctgaaccagatctggacgacaatgaggatgaggaggagcctgccgtagaaattgaacctgagccagagcctcagcctgtgaccccagccccaccacccgccaagaagcggagaggacgaccccctggcagaaccaaccagcccaaacagaaccagccaacagctatcattcaggttgaagaccagaatacaggtgcaattgagaacattatagttgaagtaaaaaaagagccagatgctgagcccgcagagggagaggaagaggaggcccagccagctgccacagatgcccccaacggagacctcacgcccgagatgatcctcagcatgatggaccggtga

SEQ ID NO: 51 - DNA, 2346 bp, Homo sapiens
atggctactcaagctgatttgatggagttggacatggccatggaaccagacagaaaagcggctgttagtcactggcagcaacagtcttacctggactctggaatccattctggtgccactaccacagctccttctctgagtggtaaaggcaatcctgaggaagaggatgtggatacctcccaagtcctgtatgagtgggaacagggattttctcagtccttcactcaagaacaagtagctgatattgatggacagtatgcaatgactcgagctcagagggtacgagctgctatgttccctgagacattagatgagggcatgcagatcccatctacacagtttgatgctgctcatcccactaatgtccagcgtttggctgaaccatcacagatgctgaaacatgcagttgtaaacttgattaactatcaagatgatgcagaacttgccacacgtgcaatccctgaactgacaaaactgctaaatgacgaggaccaggtggtggttaataaggctgcagttatggtccatcagctttctaaaaaggaagcttccagacacgctatcatgcgttctcctcagatggtgtctgctattgtacgtaccatgcagaatacaaatgatgtagaaacagctcgttgtaccgctgggaccttgcataacctttcccatcatcgtgagggcttactggccatctttaagtctggaggcattcctgccctggtgaaaatgcttggttcaccagtggattctgtgttgttttatgccattacaactctccacaaccttttattacatcaagaaggagctaaaatggcagtgcgtttagctggtgggctgcagaaaatggttgccttgctcaacaaaacaaatgttaaattcttggctattacgacagactgccttcaaattttagcttatggcaaccaagaaagcaagctcatcatactggctagtggtggaccccaagctttagtaaatataatgaggacctatacttacgaaaaactactgtggaccacaagcagagtgctgaaggtgctatctgtctgctctagtaataagccggctattgtagaagctggtggaatgcaagctttaggacttcacctgacagatccaagtcaacgtcttgttcagaactgtctttggactctcaggaatctttcagatgctgcaactaaacaggaagggatggaaggtctccttgggactcttgttcagcttctgggttcagatgatataaatgtggtcacctgtgcagctggaattctttctaacctcacttgcaataattataagaacaagatgatggtctgccaagtgggtggtatagaggctcttgtgcgtactgtccttcgggctggtgacagggaagacatcactgagcctgccatctgtgctcttcgtcatctgaccagccgacaccaagaagcagagatggcccagaatgcagttcgccttcactatggactaccagttgtggttaagctcttacacccaccatcccactggcctctgataaaggctactgttggattgattcgaaatcttgccctttgtcccgcaaatcatgcacctttgcgtgagcagggtgccattccacgactagttcagttgcttgttcgtgcacatcaggatacccagcgccgtacgtccatgggtgggacacagcagcaatttgtggagggggtccgcatggaagaaatagttgaaggttgtaccggagcccttcacatcctagctcgggatgttcacaaccgaattgttatcagaggactaaataccattccattgtttgtgcagctgctttattctcccattgaaaacatccaaagagtagctgcaggggtcctctgtgaacttgctcaggacaaggaagctgcagaagctattgaagctgagggagccacagctcctctgacagagttacttcactctaggaatgaaggtgtggcgacatatgcagctgctgttttgttccgaatgtctgaggacaagccacaagattacaagaaacggctttcagttgagctgaccagctctctcttcagaacagagccaatggcttggaatgagactgctgatcttggacttgatattggtgcccagggagaaccccttggatatcgccaggatgatcctagctatcgttcttttcactctggtggatatggccaggatgccttgggtatggaccccatgatggaacatgagatgggtggccaccaccctggtgctgactatccagttgatgggctgccagatctggggcatgcccaggacctcatggatgggctgcctccaggtgacagcaatcagctggcctggtttgatactgacctgtaa

SEQ ID NO: 52 - DNA, 2688 bp, Homo sapiens
atgtttccaacaggtttttcttcccccagtccctcagctgctgctgctgctcaggaggtcagatctgccactgatggtaataccagcaccactccgcccacctctgccaagaagagaaagttaaacagcagcagcagtagcagcagtaacagtagtaacgagagagaagactttgattccacctcttcctcctcttccactcctcctttacaacccagggattcggcatccccttcaacctcgtccttctgcctgggggtttcagtggctgcttccagccacgtaccgatacagaagaagctgcgttttgaagacaccctggagtttgtagggtttgatgcgaagatggctgaggaatcctcctcctcctcctcctcatcttcaccaactgctgcaacatctcagcagcagcaacttaaaaataagagtatattaatctcttctgtggcttcggtgcatcatgcaaacggcctagccaaatcttctaccaccgtctctagctttgctaacagcaaacctggctctgctaagaagttagtgatcaagaactttaaagataagcctaaattaccagaaaactacacagatgaaacctggcaaaaactgaaagaagcagtggaagctattcagaatagtacttcaattaagtacaatttagaagaactctaccaggctgtagaaaatctctgttcttacaagatttctgcaaacttgtacaaacagctgagacagatctgcgaagatcacatcaaagcacagattcatcaattcagagaggattcattggatagcgttctttttttaaagaagattgatagatgctggcaaaaccattgcagacaaatgatcatgatcaggagcatttttttgtttctggatagaacttacgttcttcagaattcaatgctaccctccatttgggacatgggactggagttatttagggctcatattataagtgatcagaaagtgcagaataagacaattgatggcattcttctcttgattgagagggaaaggaatggtgaagcaattgatagaagtttacttcgaagccttttaagcatgctgtctgatttgcaaatttatcaagattcttttgaacaacgatttttggaagaaactaaccggctctatgcagctgaaggccaaaaattaatgcaagaaagagaggttcctgaatatctacatcatgttaacaaacgtctagaagaagaagcagacagacttattacttacttagatcagaccacccagaagtcattaattgctactgtagaaaaacaacttctaggtgaacacttaacagcaattcttcagaaaggtttaaataacctccttgatgaaaaccgaattcaagatttgtctcttctgtatcagctcttcagtagagttcgaggtggagttcaggttcttttgcagcagtggatcgaatatatcaaggcatttggcagcactattgtaattaatcctgaaaaagataaaaccatggttcaagaattgctggattttaaagataaggttgaccatataattgatatctgctttctgaagaatgagaaatttatcaatgccatgaaagaagcatttgaaacgttcattaacaaaagaccaaataaaccagctgaacttatagctaagtatgtagattcaaaacttcgtgcaggcaacaaagaagctacagatgaagaacttgagaaaatgttggataaaattatgatcatatttagatttatctatggcaaggatgtttttgaggccttctataagaaagatttagccaagcgcctgttagtcggaaagagtgcatctgtagatgctgaaaaatcaatgctgtccaaacttaaacatgaatgcggagctgctttcaccagcaaacttgaaggaatgtttaaagacatggaactttctaaagacatcatgattcagttcaaacagtatatgcagaatcagaatgttccgggaaatattgagttaactgtgaatatcctgacaatgggctattggccgacatatgtgcctatggaagttcatttaccaccagagatggtaaaacttcaggagattttcaagacattttacctaggcaaacatagtggcaggaaacttcagtggcagtcaaccctaggacactgtgtgttaaaagcagaatttaaagagggtaaaaaggaactccaggtctctctttttcaaacactggtgctgctaatgtttaatgagggagaggagttcagtttagaagagatcaagcaggcaactggaatagaggatggagagttaaggagaacactgcagtcattagcctgtggcaaagctagagttctggcgaaaaatccaaagggcaaagacattgaagatggtgacaagttcatttgtaatgatgatttcaaacataaacttttcaggataaagatcaatcaaatccagatgaaagaaacggttgaagaacaagcaagcactacagaaagagtatttcaagacagacagtatcaaattgatgctgcaattgttcgaattatgaagatgagaaagacacttagccacaatctccttgtttcagaagtgtacaaccagttgaaatttccagtaaagcctgctgatcttaagaagagaatagaatctttaattgaccgggactacatggaaagagataaagaaaatccaaaccagtacaactatattgcatag

SEQ ID NO: 53 - DNA, 4551 bp, Homo sapiens
atggcggccaatgtgggatcgatgtttcaatattggaagcgctttgatttacagcagctgcagagagaactcgatgccaccgcaacggtattggcgaaccggcaggatgaaagtgagcagtccagaaagcggcttatcgaacagagccgggagttcaagaagaacactccagaggatttgcgcaagcaggtagcgccgctgctgaagagtttccaaggagagattgatgcactgagtaaaagaagcaaggaagctgaagcagctttcttgaatgtctacaaaagattgattgacgtcccagatcccgtaccagctttggatctcggacagcaactccagctcaaagtgcagcgcctgcacgatattgaaacagagaaccagaaacttagggaaactctggaagaatacaacaaggaatttgctgaagtgaaaaatcaagaggttacgataaaagcacttaaagagaaaatccgagaatatgaacagacactgaagaaccaagccgaaaccatagctcttgagaaggaacagaagttacagaatgactttgcagaaaaggagagaaagctgcaggagacacagatgtccaccacctcaaagctggaggaagctgagcataaggttcagagcctacaaacagccctggaaaaaactcgaacagaattatttgacctgaaaaccaaatacgatgaagaaactactgcaaaggccgacgagattgaaatgatcatgacggaccttgaaagggcaaaccagagggcagaggtggctcagagagaggcggagaccttaagggaacagctctcatcggccaatcactccctccagctggcctcacagatccagaaggcaccagacgtggagcaggccatagaggtgctgacccgctccagcctagaagttgagttggccgccaaggagcgggagatcgcacagctggtggaggacgtgcagagactccaggccagcctcaccaagctgcgggagaattcggccagccagatctcacagcttgagcagcagctgagcgccaaaaacagcacactcaaacaactggaagaaaaactcaaaggccaggctgactatgaagaggtgaagaaagagctgaacattctgaagtccatggagtttgcaccgtccgagggcgctgggacacaggatgcggccaagcccctggaggtgctgttgctggagaagaaccgctcgctgcagtccgagaacgccgcgctgcgcatctccaacagcgacctgagcgggtcagccaggaggaaagggaaagaccagcctgaaagtcggcgcccgggatctttgccggccccccctccttctcagttgccccgcaacccgggggagcaggcttccaatactaatggtacacaccagttctcaccagcggggttaagtcaagactttttcagctcatccctggcaagccccagcctacccctggcttctacaggaaaatttgcactaaactctcttctccagcggcagctaatgcagtccttctactccaaggctatgcaggaagccggaagcacaagcatgattttttcaacaggtccatacagcacaaactccatatcttcccaaagtccattacaacaaagcccagatgtcaatggcatggccccatcccccagccagtcagaaagtgctgggagcgtctccgagggcgaggagatggacactgcagaaatcgcccggcaggtcaaagagcagctgattaagcacaatatcggacaacgtattttcggacattatgtgttgggactgtctcaagggtccgtgagcgagattctggcccggcccaagccatggaataaactgactgttcgtggcaaggagccatttcacaagatgaaacagttcctctccgatgagcagaacatcctggccctccgtagcatccaaggcagacaaagagagaatccaggccagagcctgaacagactatttcaggaagtaccgaaacgaagaaatgggtctgaaggtaacatcaccacccggatccgagcctcggagactggctctgatgaagccatcaagtccatcctagagcaagccaagagggagctccaagtgcagaaaactgcagagccggcccagccttcctccgcatccggcagcgggaactctgatgacgccatccgctccatcctgcagcaagcccgccgggagatggaggcccagcaggctgccctcgaccctgccttaaagcaggcaccactgtcccagagtgacatcaccatcctcacccccaagcttctgtccacctcgcccatgcccaccgtgtccagctacccacctctcgccatctccctgaagaagccctccgcagctcctgaggccggtgcctctgctctgccgaaccccccggccctcaaaaaggaggcccaggacgcccccgggctggacccccagggagcagccgattgtgcacaaggggtcctgagacaggtgaaaaatgaggtgggccgcagcggtgcctggaaggaccactggtggagcgcggtgcagccggagagaagaaatgccgcctcctccgaggaggccaaggccgaagaaacgggcggcgggaaagagaagggcagcggtggcagcggaggtggcagccagcctcgggccgagcgcagtcagctccagggaccctcgtcgtcagagtactggaaggagtggcccagcgctgagtccccatactcccagagctcagagctgagtctgaccggggccagccgcagcgagacaccacagaacagccccctgccatcctccccgatcgtgcccatgtccaagcccaccaagccctcggtccccccgctgacccccgagcagtacgaggtctacatgtaccaggaggtggacaccatcgagctcacccggcaggttaaggaaaagctggccaagaacggcatctgccagagaatcttcggggagaaggtgctgggcctgtcccagggcagcgtcagcgacatgctgtcccgaccgaagccatggagcaagctgacgcagaaaggccgagaacccttcatccggatgcagctctggctgaacggcgagctaggccagggtgttctacccgtccagggccagcagcaagggccagtcctccactccgtgacatcgctccaggacccgctgcagcagggctgtgtgagctcagaaagcactccaaagacctccgccagctgcagccctgcccctgagtccccgatgagttccagtgagtcggtgaagagcctgaccgagctggtccagcagccctgtccccccatcgaggcgagcaaggacagcaagccaccagagcccagtgacccgccagcatccgactcccagcccacaaccccgctgcctctctccggacactcggccctcagcatccaagaattagtagccatgtccccggagctggacacctacggcataaccaagcgggtgaaggaggtgctgacggacaacaacctcggccagcgcttatttggggagaccatcttagggctcacccaaggctctgtctctgacctccttgcccgccccaaaccctggcataagctcagtctgaaaggacgagagcccttcgtccggatgcagctgtggctgaacgaccccaacaatgtggagaagctgatggacatgaaacggatggagaagaaagcctacatgaagcggcggcacagctcagtcagtgacagccagccctgcgaaccgccctctgtcggcaccgagtacagccagggcgccagcccccagccccagcaccagctgaagaaaccccgggtggtgctggctccggaggagaaggaggcgctgaaacgagcgtatcagcaaaagccatacccgtcaccaaaaaccatcgaagacctcgccacccagctcaacctgaaaaccagcaccgtcatcaactggttccacaactacaggtctcggatccgcagagaactgttcattgaggaaattcaggccgggagtcagggccaggcgggcgccagcgactcaccctcggcccgcagcggccgggcggcgcccagctcggagggcgacagctgcgacggcgtggaggccactgagggcccaggcagcgccgacaccgaggagcccaagtctcagggagaggccgagcgggaggaggtgccgcggccggcggagcagacggagccgccgccctcggggaccccgggcccggacgacgcccgcgacgacgaccacgagggaggccccgtggaaggcccggggcccctgcccagccccgcctccgcgaccgccaccgccgcgcccgcggcccccgaggacgccgctacctcagccgccgccgcgccgggggagggccccgcggccccgagctccgcgccgccgcccagcaacagcagcagcagcagcgccccccgcaggcccagctcgctgcagagccttttcggcctccccgaggccgcgggcgcccgggactcgcgcgacaaccccctgcgcaagaagaaggccgcgaacttgaacagcatcatccaccgcctggagaaggccgccagccgggaggaacctatcgaatgggagttctga

SEQ ID NO: 54 - DNA, 1989 bp, Homo sapiens
atgagtcatgtggcagtggaaaatgcgctcgggctggaccagcagtttgctggcctagacctgaactcttcagataatcagagtggaggaagtacagccagcaaagggcgctatattcctcctcatttaaggaaccgagaagctactaaaggtttctacgataaagacagttcagggtggagttctagcaaagataaggatgcgtatagcagttttggatctcgtagtgattcaagagggaagtctagcttcttcagtgatcgtggaagtggatcaaggggaaggtttgatgatcgtggacggagtgattacgatggcattggcagccgtggtgacagaagtggctttggcaaatttgaacgtggtggaaacagtcgctggtgtgacaaatcagatgaagatgattggtcaaaaccactcccaccaagtgaacgcttggaacaggaactcttttctggaggcaacactgggattaattttgagaaatacgatgacattccagttgaggcaacaggcaacaactgtcctccacatattgaaagtttcagtgatgttgagatgggagaaattatcatgggaaacattgagcttactcgttatactcgcccaactccagtgcaaaagcatgctattcctattatcaaagagaaaagagacttgatggcttgtgcccaaacagggtctggaaaaactgcagcatttctgttgcccatcttgagtcagatttattcagatggtccaggcgaggctttgagggccatgaaggaaaatggaaggtatgggcgccgcaaacaatacccaatctccttggtattagcaccaacgagagagttggcagtacagatctacgaggaagccagaaaattttcataccgatctagagttcgtccttgcgtggtttatggtggtgccgatattggtcagcagattcgagacttggaacgtggatgccatttgttagtagccactccaggacgtctagtggatatgatggaaagaggaaagattggattagacttttgcaaatacttggtgttagatgaagctgatcggatgttggatatggggtttgagcctcagattcgtagaatagtcgaacaagatactatgcctccaaagggtgtccgccacactatgatgtttagtgctacttttcctaaggaaatacagatgctggctcgtgatttcttagatgaatatatcttcttggctgtaggaagagttggctctacctctgaaaacatcacacagaaagtagtttgggtggaagaatcagacaaacggtcatttctgcttgacctcctaaatgcaacaggcaaggattcactgaccttagtgtttgtggagaccaaaaagggtgcagattctctggaggatttcttataccatgaaggatacgcatgtaccagcatccatggagaccgttctcagagggatagagaagaggcccttcaccagttccgctcaggaaaaagcccaattttagtggctacagcagtagcagcaagaggactggacatttcaaatgtgaaacatgttatcaattttgacttgccaagtgatattgaagaatatgtacatcgtattggtcgtacgggacgtgtaggaaaccttggcctggcaacctcattctttaacgagaggaacataaatattactaaggatttgttggatcttcttgttgaagctaaacaagaagtgccgtcttggttagaaaacatggcttatgaacaccactacaagggtagcagtcgtggacgttctaagagtagcagatttagtggagggtttggtgccagagactaccgacaaagtagcggtgccagcagttccagcttcagcagcagccgcgcaagcagcagccgcagtggcggaggtggccacggtagcagcagaggatttggtggaggtggctatggaggcttttacaacagtgatggatatggaggaaattataactcccagggggttgactggtggggtaactga

SEQ ID NO: 55 - DNA, 1845 bp, Homo sapiens
atgtcgggttattcgagtgaccgagaccgcggccgggaccgagggtttggtgcacctcgatttggaggaagtagggcagggcccttatctggaaagaagtttggaaaccctggggagaaattagttaaaaagaagtggaatcttgatgagctgcctaaatttgagaagaatttttatcaagagcaccctgatttggctaggcgcacagcacaagaggtggaaacatacagaagaagcaaggaaattacagttagaggtcacaactgcccgaagccagttctaaatttttatgaagccaatttccctgcaaatgtcatggatgttattgcaagacagaatttcactgaacccactgctattcaagctcagggatggccagttgctctaagtggattggatatggttggagtggcacagactggatctgggaaaacattgtcttatttgcttcctgccattgtccacatcaatcatcagccattcctagagagaggcgatgggcctatttgtttggtgctggcaccaactcgggaactggcccaacaggtgcagcaagtagctgctgaatattgtagagcatgtcgcttgaagtctacttgtatctacggtggtgctcctaagggaccacaaatacgtgatttggagagaggtgtggaaatctgtattgcaacacctggaagactgattgactttttagagtgtggaaaaaccaatctgagaagaacaacctaccttgtccttgatgaagcagatagaatgcttgatatgggctttgaaccccaaataaggaagattgtggatcaaataagacctgataggcaaactctaatgtggagtgcgacttggccaaaagaagtaagacagcttgctgaagatttcctgaaagactatattcatataaacattggtgcacttgaactgagtgcaaaccacaacattcttcagattgtggatgtgtgtcatgacgtagaaaaggatgaaaaacttattcgtctaatggaagagatcatgagtgagaaggagaataaaaccattgtttttgtggaaaccaaaagaagatgtgatgagcttaccagaaaaatgaggagagatgggtggcctgccatgggtatccatggtgacaagagtcaacaagagcgtgactgggttctaaatgaattcaaacatggaaaagctcctattctgattgctacagatgtggcctccagagggctagatgtggaagatgtgaaatttgtcatcaattatgactaccctaactcctcagaggattatattcatcgaattggaagaactgctcgcagtaccaaaacaggcacagcatacactttctttacacctaataacataaagcaagtgagcgaccttatctctgtgcttcgtgaagctaatcaagcaattaatcccaagttgcttcagttggtcgaagacagaggttcaggtcgttccaggggtagaggaggcatgaaggatgaccgtcgggacagatactctgcgggcaaaaggggtggatttaatacctttagagacagggaaaattatgacagaggttactctagcctgcttaaaagagattttggggcaaaaactcagaatggtgtttacagtgctgcaaattacaccaatgggagctttggaagtaattttgtgtctgctggtatacagaccagttttaggactggtaatccaacagggacttaccagaatggttatgatagcactcagcaatacggaagtaatgttccaaatatgcacaatggtatgaaccaacaggcatatgcatatcctgctactgcagctgcacctatgattggttatccaatgccaacaggatattcccaataa

SEQ ID NO: 56 - DNA, 3810 bp, Homo sapiens
atggagccgcccggcgggagcctggggcccggccgcgggacccgggacaagaagaagggccggagcccagatgagctgccctcggcgggcggcgacggcggcaaatctaagaaatttactctgaagcggctcatggcagatgagctggagagatttaccagcatgagaattaagaaggagaaggaaaagcccaattctgctcatagaaattcttctgcatcatatggggatgatcccacagcacagtcattgcaagatgtttcagatgaacaagtgctggttctctttgaacagatgctgctggatatgaacctgaatgaggagaaacagcaacctttgagggagaaggacatcatcatcaagagggagatggtgtcccaatacttgtacacctccaaggctggcatgagccagaaggagagctctaagtctgccatgatgtatattcaggagttgaggtcaggcttgcgggatatgcctctgctcagctgcctggagtcccttcgtgtgtctctcaacaacaaccctgtcagttgggtgcaaacatttggtgctgaaggcttggcctccttattggacattcttaaacgacttcatgatgagaaagaagagactgctgggagttacgatagccggaacaagcatgagatcattcgctgcttgaaagcttttatgaacaacaagtttggaatcaagaccatgttggagacagaagaaggaatcctactgctggtcagagccatggatcctgctgttcccaacatgatgattgatgcagctaagctgctttctgctctttgtattctaccgcagccagaggacatgaatgaaagggttttggaggcaatgacagaaagagctgagatggatgaagtggaacgtttccagccgctgctggatggattaaaaagtggaaccactattgcactgaaggttggatgcctacagctgatcaatgctctcatcacaccagcggaggaacttgacttccgagttcacatcagaagtgaactgatgcgtttggggctacatcaggtgttgcaggaccttcgagagattgaaaatgaagatatgagagtgcaactaaatgtgtttgatgaacaaggggaagaggattcctatgacctgaagggacggctggatgacattcgcatggagatggatgactttaatgaagtctttcagattctcttaaacacagtgaaggattcaaaggcagagccacacttcctttccatcctgcagcacttactcttggtccgaaatgactatgaggccagacctcagtactataagttgattgaagaatgtatttcccagatagttctgcacaagaacggggctgatcctgacttcaagtgccggcacctccagattgagattgagggattaattgatcaaatgattgataagacaaaggtggagaaatctgaagccaaagctgcagagctggaaaagaagttggactcagagttaacagcccgacatgagctacaggtggaaatgaaaaagatggaaagtgactttgagcagaagcttcaagatcttcagggagaaaaagatgcactgcattctgaaaagcagcaaattgccacagagaaacaggacctggaagcagaggtgtcccagctcacaggagaggttgccaagctgacaaaggaactggaagatgccaagaaagaaatggcttccctctctgcggcagctattactgtacctccttctgttcctagtcgtgctcctgttccccctgcccctcctttacctggtgactctggcactattattccaccaccacctgctcctggggatagtaccactcctcctcctcctcctcctcctcctcctcctccacctcctttgcctgggggtgtttgcatctcctcacccccttctttacctggaggtactgctatctctccaccccctcctttgtctggggatgctaccatccctccaccccctcctttgcctgagggtgttggcatcccttcaccctcttctttgcctggaggtactgccatccccccacctcctcctttgcctgggagtgctagaatccccccaccaccacctcctttgcctgggagtgctggaattccccccccacctcctcccttgcctggagaagcaggaatgccacctcctcctccccctcttcctggtggtcctggaatccctccacctcctccatttcccggaggccctggcattcctccacctccacccggaatgggtatgcctccacctcccccatttggatttggagttcctgcagccccagttctgccatttggattaacccccaaaaagctttataagccagaggtgcagctccggaggccaaactggtccaagcttgtggctgaggacctctcccaggactgcttctggacaaaggtgaaggaggaccgctttgagaacaatgaacttttcgccaaacttacccttaccttctctgcccagaccaagaccaagaaggatcaagaaggtggagaagaaaagaaatctgtgcaaaagaaaaaagtaaaagagttaaaggtgttggattcaaagacagcccagaatctctcaatctttttgggttccttccgcatgccctatcaagagattaagaatgtcatcctggaggtgaatgaggctgttctgactgagtctatgatccagaacctcattaagcaaatgccagagccagagcagttaaaaatgctttctgaactgaaggatgaatatgatgacctggctgagtcagagcagtttggcgtggtgatgggcactgtgccccgactgcggcctcgcctcaatgccattctcttcaagctacaattcagcgagcaagtggagaatatcaagccagagattgtgtctgtcactgctgcatgtgaggagttacgtaagagtgagagcttttccaatctcctagagattaccttgcttgttggaaattacatgaatgctggctccagaaatgctggtgcttttggcttcaatatcagcttcctctgtaagcttcgagacaccaagtccacagatcagaagatgacgttgttacacttcttggctgagttgtgtgagaatgactatcccgatgtcctcaagtttccagacgagcttgcccatgtggagaaagccagccgagtttctgctgaaaacttgcaaaagaacctagatcagatgaagaaacaaatttctgatgtggaacgtgatgttcagaatttcccagctgccacagatgaaaaagacaagtttgttgaaaaaatgaccagctttgtgaaggatgcacaggaacagtataacaagctgcggatgatgcattctaacatggagaccctctataaggagctgggcgagtacttcctctttgaccccaagaagttgtctgttgaagaatttttcatggatcttcacaattttcggaatatgtttttgcaagcagtcaaggagaaccagaagcggcgggagacagaagaaaagatgaggcgagcaaaactagccaaggagaaggcagagaaggagcggctagagaagcagcagaagagagagcaactcatagacatgaatgcagagggcgatgagacaggtgtgatggacagtcttctagaagccctgcagtcaggggcagcattccgacggaagagagggccccgtcaagccaacaggaaggccgggtgtgcagtcacatctctgctagcttcggagctgaccaaggatgatgccatggctgctgttcctgccaaggtgtccaagaacagtgagacattccccacaatccttgaggaagccaaggagttggttggccgtgcaagctaa

SEQ ID NO: 57 - DNA, 2877 bp, Homo sapiens
atgctcaagtccaagacgttcttaaaaaagacccgggcgggcggcgtgatgaagatcgtgcgcgagcactacctgcgagacgacatcggctgcggtgcgcccgggtgcgcagcgtgtggaggggcgcacgaggggccggccctggagccgcagccccaggacccggcgagcagcgtctgcccgcaaccgcactacttgctgcccgacactaatgtgttactgcaccagattgatgttcttgaggaccctgccatcaggaatgtaattgtgctacaaacagttcttcaagaagtgagaaatcgcagtgcccccgtatataaacgcatccgagatgtgactaataaccaagagaagcatttctatactttcactaatgagcaccatagagaaacctatgtagaacaagaacagggagaaaatgctaatgacaggaatgatagagcgattcgagtagcagcaaaatggtacaatgaacatttgaaaaaaatgtcagcagacaaccagctgcaagttatcttcataacaaatgacaggagaaacaaagagaaagccatagaagaaggaataccagctttcacttgtgaagaatatgtaaagagcctaactgctaaccccgaactcatagatcgtcttgcttgtttgtctgaagaagggaatgaaatagaaagtggaaaaataatattttcagagcatcttcccttaagtaagctacagcaaggcataaaatctggtacataccttcaaggaacatttagagctagcagggaaaattacttggaagctacagtatggattcatggcgacaatgaagaaaataaagagataatcttacagggacttaaacatttaaacagagctgttcacgaagatattgtggctgtggagcttctccccaagagtcagtgggtagcaccatcttctgtggttttacatgatgaaggtcaaaatgaagaagatgtggagaaagaagaagagacagaacgaatgcttaagactgctgtaagcgagaaaatgttgaagcctacaggtagagttgtaggaataataaaaaggaattggagaccatattgtggcatgctttccaagtctgacattaaggagtcaagaagacatctctttacacctgctgataagagaatccctcgaattcgcatagaaaccagacaggcttccacattagaaggacggagaattattgttgctattgatggttggcccagaaattccagatatccaaatggacactttgtgagaaatttaggtgatgttggagagaaagagactgaaacagaagttttgttacttgaacacgatgttccccatcagcctttttcacaggctgttcttagttttctgccaaagatgccctggagcattactgaaaaggacatgaaaaaccgagaagacctgaggcatctgtgtatttgtagtgtagacccaccaggatgtactgatatagacgatgctctacattgtcgagaactcgaaaatggaaatttggaggttggtgttcatattgctgatgtgagccattttattaggccaggaaatgccttggatcaagaatcagccagaagaggaacaactgtgtatctttgtgaaaagaggattgacatggttccagagttgcttagctctaacttgtgttccttaaaatgtgacgtggacaggctggcattttcatgtatttgggaaatgaatcacaatgctgaaatcttaaaaacgaagtttaccaaaagtgttattaattcaaaggcatctctgacgtatgctgaagctcagttgagaattgattcagcaaacatgaatgatgatattaccactagtctccgtggactgaataaactagccaaaattctgaagaaaagaaggattgaaaaaggggctttgactctatcctctcctgaagttcgattccacatggacagtgaaactcacgatcctatagatctgcagaccaaggaacttagggaaacaaattccatggttgaagaatttatgttacttgccaatatttctgttgcaaaaaaaattcatgaggaattttctgaacatgctctgcttcgaaaacatcctgctccacctccatcaaattatgaaattcttgttaaggcagccaggtcaaggaatttggaaattaagactgatacagccaagtctttggctgagtctttggatcaggccgaatctcctacttttccatatctaaacactctgttgagaatattagccactcgctgtatgatgcaagctgtgtacttctgttctggaatggataatgattttcatcactatggcttagcgtctccaatatacacacattttacttcacccattagaagatacgcagatgtcattgttcatcggcttttggctgtggctattggggctgactgtacttatccagagttgacagacaaacacaagcttgcagatatatgtaaaaatctaaatttccggcacaaaatggctcaatatgcccaacgtgcatcagtggcttttcatacccagttattcttcaaaagcaaaggaatagtaagtgaagaagcctatattttatttgtaagaaagaatgccattgtggtattaattccaaagtatggtttagaagggacagtcttttttgaagaaaaggacaaaccaaacccacagcttatttatgatgatgagataccctcacttaaaatagaagatacagtgttccatgtatttgataaagttaaagtgaaaatcatgttagactcatctaatcttcaacatcagaagatccgaatgtccctggtagaaccacagataccaggaataagcattcctactgatacttcaaacatggaccttaatggaccaaagaaaaagaagatgaagcttggaaaatag

SEQ ID NO: 58 - DNA, 2214 bp, Homo sapiens
atgcagccccgccgcgcccaggcgcccggtgcgcagctgctgcccgcgctggccctgctgctgctgctgctcggagcggggccccgaggcagctccctggccaacccggtgcccgccgcgcccctgtctgcgcccgggccgtgcgccgcgcagccctgccggaatgggggtgtgtgcacctcgcgccctgagccggacccgcagcacccggcccccgccggcgagcctggctacagctgcacctgccccgccgggatctccggcgccaactgccagcttgttgcagatccttgtgccagcaacccttgtcaccatggcaactgcagcagcagcagcagcagcagcagcgatggctacctctgcatttgcaatgaaggctatgaaggtcccaactgtgaacaggcacttcccagtctcccagccactggctggaccgaatccatggcaccccgacagcttcagcctgttcctgctactcaggagcctgacaaaatcctgcctcgctctcaggcaacggtgacactgcctacctggcagccgaaaacagggcagaaagttgtagaaatgaaatgggatcaagtggaggtgatcccagatattgcctgtgggaatgccagttctaacagctctgcgggtggccgcctggtatcctttgaagtgccacagaacacctcagtcaagattcggcaagatgccactgcctcactgattttgctctggaaggtcacggccacaggattccaacagtgctccctcatagatggacgaagtgtgaccccccttcaggcttcagggggactggtcctcctggaggagatgctcgccttggggaataatcactttattggttttgtgaatgattctgtgactaagtctattgtggctttgcgcttaactctggtggtgaaggtcagcacctgtgtgccgggggagagtcacgcaaatgacttggagtgttcaggaaaaggaaaatgcaccacgaagccgtcagaggcaactttttcctgtacctgtgaggagcagtacgtgggtactttctgtgaagaatacgatgcttgccagaggaaaccttgccaaaacaacgcgagctgtattgatgcaaatgaaaagcaagatgggagcaatttcacctgtgtttgccttcctggttatactggagagctttgccagtccaagattgattactgcatcctagacccatgcagaaatggagcaacatgcatttccagtctcagtggattcacctgccagtgtccagaaggatacttcggatctgcttgtgaagaaaaggtggacccctgcgcctcgtctccgtgccagaacaacggcacctgctatgtggacggggtacactttacctgcaactgcagcccgggcttcacagggccgacctgtgcccagcttattgacttctgtgccctcagcccctgtgctcatggcacgtgccgcagcgtgggcaccagctacaaatgcctctgtgatccaggttaccatggcctctactgtgaggaggaatataatgagtgcctctccgctccatgcctgaatgcagccacctgcagggacctcgttaatggctatgagtgtgtgtgcctggcagaatacaaaggaacacactgtgaattgtacaaggatccctgcgctaacgtcagctgtctgaacggagccacctgtgacagcgacggcctgaatggcacgtgcatctgtgcacccgggtttacaggtgaagagtgcgacattgacataaatgaatgtgacagtaacccctgccaccatggtgggagctgcctggaccagcccaatggttataactgccactgcccgcatggttgggtgggagcaaactgtgagatccacctccaatggaagtccgggcacatggcggagagcctcaccaacatgccacggcactccctctacatcatcattggagccctctgcgtggccttcatccttatgctgatcatcctgatcgtggggatttgccgcatcagccgcattgaataccagggttcttccaggccagcctatgaggagttctacaactgccgcagcatcgacagcgagttcagcaatgccattgcatccatccggcatgccaggtttggaaagaaatcccggcctgcaatgtatgatgtgagccccatcgcctatgaagattacagtcctgatgacaaacccttggtcacactgattaaaactaaagatttgtaa

SEQ ID NO: 59 - DNA, 2739 bp, Homo sapiens
atgcccgccatgccctccagcggccccggggacaccagcagctctgctgcggagcgggaggaggaccgaaaggacggagaggagcaggaggagccgcgtggcaaggaggagcgccaagagcccagcaccacggcacggaaggtggggcggcctgggaggaagcgcaagcaccccccggtggaaagcggtgacacgccaaaggaccctgcggtgatctccaagtccccatccatggcccaggactcaggcgcctcagagctattacccaatggggacttggagaagcggagtgagccccagccagaggaggggagccctgctggggggcagaagggcggggccccagcagagggagagggtgcagctgagaccctgcctgaagcctcaagagcagtggaaaatggctgctgcacccccaaggagggccgaggagcccctgcagaagcgggcaaagaacagaaggagaccaacatcgaatccatgaaaatggagggctcccggggccggctgcggggtggcttgggctgggagtccagcctccgtcagcggcccatgccgaggctcaccttccaggcgggggacccctactacatcagcaagcgcaagcgggacgagtggctggcacgctggaaaagggaggctgagaagaaagccaaggtcattgcaggaatgaatgctgtggaagaaaaccaggggcccggggagtctcagaaggtggaggaggccagccctcctgctgtgcagcagcccactgaccccgcatcccccactgtggctaccacgcctgagcccgtggggtccgatgctggggacaagaatgccaccaaagcaggcgatgacgagccagagtacgaggacggccggggctttggcattggggagctggtgtgggggaaactgcggggcttctcctggtggccaggccgcattgtgtcttggtggatgacgggccggagccgagcagctgaaggcacccgctgggtcatgtggttcggagacggcaaattctcagtggtgtgtgttgagaagctgatgccgctgagctcgttttgcagtgcgttccaccaggccacgtacaacaagcagcccatgtaccgcaaagccatctacgaggtcctgcaggtggccagcagccgcgcggggaagctgttcccggtgtgccacgacagcgatgagagtgacactgccaaggccgtggaggtgcagaacaagcccatgattgaatgggccctggggggcttccagccttctggccctaagggcctggagccaccagaagaagagaagaatccctacaaagaagtgtacacggacatgtgggtggaacctgaggcagctgcctacgcaccacctccaccagccaaaaagccccggaagagcacagcggagaagcccaaggtcaaggagattattgatgagcgcacaagagagcggctggtgtacgaggtgcggcagaagtgccggaacattgaggacatctgcatctcctgtgggagcctcaatgttaccctggaacaccccctcttcgttggaggaatgtgccaaaactgcaagaactgctttctggagtgtgcgtaccagtacgacgacgacggctaccagtcctactgcaccatctgctgtgggggccgtgaggtgctcatgtgcggaaacaacaactgctgcaggtgcttttgcgtggagtgtgtggacctcttggtggggccgggggctgcccaggcagccattaaggaagacccctggaactgctacatgtgcgggcacaagggtacctacgggctgctgcggcggcgagaggactggccctcccggctccagatgttcttcgctaataaccacgaccaggaatttgaccctccaaaggtttacccacctgtcccagctgagaagaggaagcccatccgggtgctgtctctctttgatggaatcgctacagggctcctggtgctgaaggacttgggcattcaggtggaccgctacattgcctcggaggtgtgtgaggactccatcacggtgggcatggtgcggcaccaggggaagatcatgtacgtcggggacgtccgcagcgtcacacagaagcatatccaggagtggggcccattcgatctggtgattgggggcagtccctgcaatgacctctccatcgtcaaccctgctcgcaagggcctctacgagggcactggccggctcttctttgagttctaccgcctcctgcatgatgcgcggcccaaggagggagatgatcgccccttcttctggctctttgagaatgtggtggccatgggcgttagtgacaagagggacatctcgcgatttctcgagtccaaccctgtgatgattgatgccaaagaagtgtcagctgcacacagggcccgctacttctggggtaaccttcccggtatgaacaggccgttggcatccactgtgaatgataagctggagctgcaggagtgtctggagcatggcaggatagccaagttcagcaaagtgaggaccattactacgaggtcaaactccataaagcagggcaaagaccagcattttcctgtcttcatgaatgagaaagaggacatcttatggtgcactgaaatggaaagggtatttggtttcccagtccactatactgacgtctccaacatgagccgcttggcgaggcagagactgctgggccggtcatggagcgtgccagtcatccgccacctcttcgctccgctgaaggagtattttgcgtgtgtgtaa

SEQ ID NO: 60 - DNA, 3633 bp, Homo sapiens
atgcgaccctccgggacggccggggcagcgctcctggcgctgctggctgcgctctgcccggcgagtcgggctctggaggaaaagaaagtttgccaaggcacgagtaacaagctcacgcagttgggcacttttgaagatcattttctcagcctccagaggatgttcaataactgtgaggtggtccttgggaatttggaaattacctatgtgcagaggaattatgatctttccttcttaaagaccatccaggaggtggctggttatgtcctcattgccctcaacacagtggagcgaattcctttggaaaacctgcagatcatcagaggaaatatgtactacgaaaattcctatgccttagcagtcttatctaactatgatgcaaataaaaccggactgaaggagctgcccatgagaaatttacaggaaatcctgcatggcgccgtgcggttcagcaacaaccctgccctgtgcaacgtggagagcatccagtggcgggacatagtcagcagtgactttctcagcaacatgtcgatggacttccagaaccacctgggcagctgccaaaagtgtgatccaagctgtcccaatgggagctgctggggtgcaggagaggagaactgccagaaactgaccaaaatcatctgtgcccagcagtgctccgggcgctgccgtggcaagtcccccagtgactgctgccacaaccagtgtgctgcaggctgcacaggcccccgggagagcgactgcctggtctgccgcaaattccgagacgaagccacgtgcaaggacacctgccccccactcatgctctacaaccccaccacgtaccagatggatgtgaaccccgagggcaaatacagctttggtgccacctgcgtgaagaagtgtccccgtaattatgtggtgacagatcacggctcgtgcgtccgagcctgtggggccgacagctatgagatggaggaagacggcgtccgcaagtgtaagaagtgcgaagggccttgccgcaaagtgtgtaacggaataggtattggtgaatttaaagactcactctccataaatgctacgaatattaaacacttcaaaaactgcacctccatcagtggcgatctccacatcctgccggtggcatttaggggtgactccttcacacatactcctcctctggatccacaggaactggatattctgaaaaccgtaaaggaaatcacagggtttttgctgattcaggcttggcctgaaaacaggacggacctccatgcctttgagaacctagaaatcatacgcggcaggaccaagcaacatggtcagttttctcttgcagtcgtcagcctgaacataacatccttgggattacgctccctcaaggagataagtgatggagatgtgataatttcaggaaacaaaaatttgtgctatgcaaatacaataaactggaaaaaactgtttgggacctccggtcagaaaaccaaaattataagcaacagaggtgaaaacagctgcaaggccacaggccaggtctgccatgccttgtgctcccccgagggctgctggggcccggagcccagggactgcgtctcttgccggaatgtcagccgaggcagggaatgcgtggacaagtgcaaccttctggagggtgagccaagggagtttgtggagaactctgagtgcatacagtgccacccagagtgcctgcctcaggccatgaacatcacctgcacaggacggggaccagacaactgtatccagtgtgcccactacattgacggcccccactgcgtcaagacctgcccggcaggagtcatgggagaaaacaacaccctggtctggaagtacgcagacgccggccatgtgtgccacctgtgccatccaaactgcacctacggatgcactgggccaggtcttgaaggctgtccaacgaatgggcctaagatcccgtccatcgccactgggatggtgggggccctcctcttgctgctggtggtggccctggggatcggcctcttcatgcgaaggcgccacatcgttcggaagcgcacgctgcggaggctgctgcaggagagggagcttgtggagcctcttacacccagtggagaagctcccaaccaagctctcttgaggatcttgaaggaaactgaattcaaaaagatcaaagtgctgggctccggtgcgttcggcacggtgtataagggactctggatcccagaaggtgagaaagttaaaattcccgtcgctatcaaggaattaagagaagcaacatctccgaaagccaacaaggaaatcctcgatgaagcctacgtgatggccagcgtggacaacccccacgtgtgccgcctgctgggcatctgcctcacctccaccgtgcagctcatcacgcagctcatgcccttcggctgcctcctggactatgtccgggaacacaaagacaatattggctcccagtacctgctcaactggtgtgtgcagatcgcaaagggcatgaactacttggaggaccgtcgcttggtgcaccgcgacctggcagccaggaacgtactggtgaaaacaccgcagcatgtcaagatcacagattttgggctggccaaactgctgggtgcggaagagaaagaataccatgcagaaggaggcaaagtgcctatcaagtggatggcattggaatcaattttacacagaatctatacccaccagagtgatgtctggagctacggggtgactgtttgggagttgatgacctttggatccaagccatatgacggaatccctgccagcgagatctcctccatcctggagaaaggagaacgcctccctcagccacccatatgtaccatcgatgtctacatgatcatggtcaagtgctggatgatagacgcagatagtcgcccaaagttccgtgagttgatcatcgaattctccaaaatggcccgagacccccagcgctaccttgtcattcagggggatgaaagaatgcatttgccaagtcctacagactccaacttctaccgtgccctgatggatgaagaagacatggacgacgtggtggatgccgacgagtacctcatcccacagcagggcttcttcagcagcccctccacgtcacggactcccctcctgagctctctgagtgcaaccagcaacaattccaccgtggcttgcattgatagaaatgggctgcaaagctgtcccatcaaggaagacagcttcttgcagcgatacagctcagaccccacaggcgccttgactgaggacagcatagacgacaccttcctcccagtgcctgaatacataaaccagtccgttcccaaaaggcccgctggctctgtgcagaatcctgtctatcacaatcagcctctgaaccccgcgcccagcagagacccacactaccaggacccccacagcactgcagtgggcaaccccgagtatctcaacactgtccagcccacctgtgtcaacagcacattcgacagccctgcccactgggcccagaaaggcagccaccaaattagcctggacaaccctgactaccagcaggacttctttcccaaggaagccaagccaaatggcatctttaagggctccacagctgaaaatgcagaatacctaagggtcgcgccacaaagcagtgaatttattggagcatga

SEQ ID NO: 61 - DNA, 1002 bp, Homo sapiens
atgtctggggacgagatgatttttgatcctactatgagcaagaagaaaaagaagaagaagaagccttttatgttagatgaggaaggggatacccaaacagaggaaacccagccttcagaaacaaaagaagtggagccagagccaactgaggacaaggatttggaagctgatgaagaggacactaggaaaaaagatgcttctgatgatctagatgacttgaacttctttaatcaaaagaaaaagaagaaaaaaactaaaaagatatttgatattgatgaagctgaagaaggtgtaaaggatcttaagattgaaagtgatgttcaagaaccaactgaaccagaggatgaccttgacattatgcttggcaataaaaagaagaaaaagaagaatgttaagttcccagatgaggatgaaatactagagaaagatgaagctctagaagatgaagacaacaaaaaagatgatggtatctcattcagtaatcagacaggccctgcttgggcaggctcagaaagagactacacatacgaggagctgctgaatcgagtgttcaacatcatgagggaaaagaatccagatatggttgctggggagaaaaggaaatttgtcatgaaacctccacaagtcgtccgagtaggaaccaagaaaacttcttttgtcaactttacagatatctgtaaactattacatcgtcagcccaaacatctccttgcatttttgttggctgaattgggtacaagtggttctatagatggtaataaccaacttgtaatcaaaggaagattccaacagaaacagatagaaaatgtcttgagaagatatatcaaggaatatgtcacttgtcacacatgccgatcaccggacacaatcctgcagaaggacacacgactctatttcctacagtgcgaaacttgtcattctagatgttctgttgccagtatcaaaaccggcttccaggctgtcacgggcaagcgagcacagctccgtgccaaagctaactaa

SEQ ID NO: 62 - DNA, 1116 bp, Homo sapiens
atggctgcaacctgtgagattagcaacatttttagcaactacttcagtgcgatgtacagctcggaggactccaccctggcctctgttccccctgctgccacctttggggccgatgacttggtactgaccctgagcaacccccagatgtcattggagggtacagagaaggccagctggttgggggaacagccccagttctggtcgaagacgcaggttctggactggatcagctaccaagtggagaagaacaagtacgacgcaagcgccattgacttctcacgatgtgacatggatggcgccaccctctgcaattgtgcccttgaggagctgcgtctggtctttgggcctctgggggaccaactccatgcccagctgcgagacctcacttccagctcttctgatgagctcagttggatcattgagctgctggagaaggatggcatggccttccaggaggccctagacccagggccctttgaccagggcagcccctttgcccaggagctgctggacgacggtcagcaagccagcccctaccaccccggcagctgtggcgcaggagccccctcccctggcagctctgacgtctccaccgcagggactggtgcttctcggagctcccactcctcagactccggtggaagtgacgtggacctggatcccactgatggcaagctcttccccagcgatggttttcgtgactgcaagaagggggatcccaagcacgggaagcggaaacgaggccggccccgaaagctgagcaaagagtactgggactgtctcgagggcaagaagagcaagcacgcgcccagaggcacccacctgtgggagttcatccgggacatcctcatccacccggagctcaacgagggcctcatgaagtgggagaatcggcatgaaggcgtcttcaagttcctgcgctccgaggctgtggcccaactatggggccaaaagaaaaagaacagcaacatgacctacgagaagctgagccgggccatgaggtactactacaaacgggagatcctggaacgggtggatggccggcgactcgtctacaagtttggcaaaaactcaagcggctggaaggaggaagaggttctccagagtcggaactga

SEQ ID NO: 63 - DNA, 7245 bp, Homo sapiens
atggccgagaatgtggtggaaccggggccgccttcagccaagcggcctaaactctcatctccggccctctcggcgtccgccagcgatggcacagattttggctctctatttgacttggagcacgacttaccagatgaattaatcaactctacagaattgggactaaccaatggtggtgatattaatcagcttcagacaagtcttggcatggtacaagatgcagcttctaaacataaacagctgtcagaattgctgcgatctggtagttcccctaacctcaatatgggagttggtggcccaggtcaagtcatggccagccaggcccaacagagcagtcctggattaggtttgataaatagcatggtcaaaagcccaatgacacaggcaggcttgacttctcccaacatggggatgggcactagtggaccaaatcagggtcctacgcagtcaacaggtatgatgaacagtccagtaaatcagcctgccatgggaatgaacacagggatgaatgcgggcatgaatcctggaatgttggctgcaggcaatggacaagggataatgcctaatcaagtcatgaacggttcaattggagcaggccgagggcgacagaatatgcagtacccaaacccaggcatgggaagtgctggcaacttactgactgagcctcttcagcagggctctccccagatgggaggacaaacaggattgagaggcccccagcctcttaagatgggaatgatgaacaaccccaatccttatggttcaccatatactcagaatcctggacagcagattggagccagtggccttggtctccagattcagacaaaaactgtactatcaaataacttatctccatttgctatggacaaaaaggcagttcctggtggaggaatgcccaacatgggtcaacagccagccccgcaggtccagcagccaggcctggtgactccagttgcccaagggatgggttctggagcacatacagctgatccagagaagcgcaagctcatccagcagcagcttgttctccttttgcatgctcacaagtgccagcgccgggaacaggccaatggggaagtgaggcagtgcaaccttccccactgtcgcacaatgaagaatgtcctaaaccacatgacacactgccagtcaggcaagtcttgccaagtggcacactgtgcatcttctcgacaaatcatttcacactggaagaattgtacaagacatgattgtcctgtgtgtctccccctcaaaaatgctggtgataagagaaatcaacagccaattttgactggagcacccgttggacttggaaatcctagctctctaggggtgggtcaacagtctgcccccaacctaagcactgttagtcagattgatcccagctccatagaaagagcctatgcagctcttggactaccctatcaagtaaatcagatgccgacacaaccccaggtgcaagcaaagaaccagcagaatcagcagcctgggcagtctccccaaggcatgcggcccatgagcaacatgagtgctagtcctatgggagtaaatggaggtgtaggagttcaaacgccgagtcttctttctgactcaatgttgcattcagccataaattctcaaaacccaatgatgagtgaaaatgccagtgtgccctccctgggtcctatgccaacagcagctcaaccatccactactggaattcggaaacagtggcacgaagatattactcaggatcttcgaaatcatcttgttcacaaactcgtccaagccatatttcctacgccggatcctgctgctttaaaagacagacggatggaaaacctagttgcatatgctcggaaagttgaaggggacatgtatgaatctgcaaacaatcgagcggaatactaccaccttctagctgagaaaatctataagatccagaaagaactagaagaaaaacgaaggaccagactacagaagcagaacatgctaccaaatgctgcaggcatggttccagtttccatgaatccagggcctaacatgggacagccgcaaccaggaatgacttctaatggccctctacctgacccaagtatgatccgtggcagtgtgccaaaccagatgatgcctcgaataactccacaatctggtttgaatcaatttggccagatgagcatggcccagccccctattgtaccccggcaaacccctcctcttcagcaccatggacagttggctcaacctggagctctcaacccgcctatgggctatgggcctcgtatgcaacagccttccaaccagggccagttccttcctcagactcagttcccatcacagggaatgaatgtaacaaatatccctttggctccgtccagcggtcaagctccagtgtctcaagcacaaatgtctagttcttcctgcccggtgaactctcctataatgcctccagggtctcaggggagccacattcactgtccccagcttcctcaaccagctcttcatcagaattcaccctcgcctgtacctagtcgtacccccacccctcaccatactcccccaagcataggggctcagcagccaccagcaacaacaattccagcccctgttcctacacctcctgccatgccacctgggccacagtcccaggctctacatccccctccaaggcagacacctacaccaccaacaacacaacttccccaacaagtgcagccttcacttcctgctgcaccttctgctgaccagccccagcagcagcctcgctcacagcagagcacagcagcgtctgttcctaccccaacagcaccgctgcttcctccgcagcctgcaactccactttcccagccagctgtaagcattgaaggacaggtatcaaatcctccatctactagtagcacagaagtgaattctcaggccattgctgagaagcagccttcccaggaagtgaagatggaggccaaaatggaagtggatcaaccagaaccagcagatactcagccggaggatatttcagagtctaaagtggaagactgtaaaatggaatctaccgaaacagaagagagaagcactgagttaaaaactgaaataaaagaggaggaagaccagccaagtacttcagctacccagtcatctccggctccaggacagtcaaagaaaaagattttcaaaccagaagaactacgacaggcactgatgccaactttggaggcactttaccgtcaggatccagaatcccttccctttcgtcaacctgtggaccctcagcttttaggaatccctgattactttgatattgtgaagagccccatggatctttctaccattaagaggaagttagacactggacagtatcaggagccctggcagtatgtcgatgatatttggcttatgttcaataatgcctggttatataaccggaaaacatcacgggtatacaaatactgctccaagctctctgaggtctttgaacaagaaattgacccagtgatgcaaagccttggatactgttgtggcagaaagttggagttctctccacagacactgtgttgctacggcaaacagttgtgcacaatacctcgtgatgccacttattacagttaccagaacaggtatcatttctgtgagaagtgtttcaatgagatccaaggggagagcgtttctttgggggatgacccttcccagcctcaaactacaataaataaagaacaattttccaagagaaaaaatgacacactggatcctgaactgtttgttgaatgtacagagtgcggaagaaagatgcatcagatctgtgtccttcaccatgagatcatctggcctgctggattcgtctgtgatggctgtttaaagaaaagtgcacgaactaggaaagaaaataagttttctgctaaaaggttgccatctaccagacttggcacctttctagagaatcgtgtgaatgactttctgaggcgacagaatcaccctgagtcaggagaggtcactgttagagtagttcatgcttctgacaaaaccgtggaagtaaaaccaggcatgaaagcaaggtttgtggacagtggagagatggcagaatcctttccataccgaaccaaagccctctttgcctttgaagaaattgatggtgttgacctgtgcttctttggcatgcatgttcaagagtatggctctgactgccctccacccaaccagaggagagtatacatatcttacctcgatagtgttcatttcttccgtcctaaatgcttgaggactgcagtctatcatgaaatcctaattggatatttagaatatgtcaagaaattaggttacacaacagggcatatttgggcatgtccaccaagtgagggagatgattatatcttccattgccatcctcctgaccagaagatacccaagcccaagcgactgcaggaatggtacaaaaaaatgcttgacaaggctgtatcagagcgtattgtccatgactacaaggatatttttaaacaagctactgaagatagattaacaagtgcaaaggaattgccttatttcgagggtgatttctggcccaatgttctggaagaaagcattaaggaactggaacaggaggaagaagagagaaaacgagaggaaaacaccagcaatgaaagcacagatgtgaccaagggagacagcaaaaatgctaaaaagaagaataataagaaaaccagcaaaaataagagcagcctgagtaggggcaacaagaagaaacccgggatgcccaatgtatctaacgacctctcacagaaactatatgccaccatggagaagcataaagaggtcttctttgtgatccgcctcattgctggccctgctgccaactccctgcctcccattgttgatcctgatcctctcatcccctgcgatctgatggatggtcgggatgcgtttctcacgctggcaagggacaagcacctggagttctcttcactccgaagagcccagtggtccaccatgtgcatgctggtggagctgcacacgcagagccaggaccgctttgtctacacctgcaatgaatgcaagcaccatgtggagacacgctggcactgtactgtctgtgaggattatgacttgtgtatcacctgctataacactaaaaaccatgaccacaaaatggagaaactaggccttggcttagatgatgagagcaacaaccagcaggctgcagccacccagagcccaggcgattctcgccgcctgagtatccagcgctgcatccagtctctggtccatgcttgccagtgtcggaatgccaattgctcactgccatcctgccagaagatgaagcgggttgtgcagcataccaagggttgcaaacggaaaaccaatggcgggtgccccatctgcaagcagctcattgccctctgctgctaccatgccaagcactgccaggagaacaaatgcccggtgccgttctgcctaaacatcaagcagaagctccggcagcaacagctgcagcaccgactacagcaggcccaaatgcttcgcaggaggatggccagcatgcagcggactggtgtggttgggcagcaacagggcctcccttcccccactcctgccactccaacgacaccaactggccaacagccaaccaccccgcagacgccccagcccacttctcagcctcagcctacccctcccaatagcatgccaccctacttgcccaggactcaagctgctggccctgtgtcccagggtaaggcagcaggccaggtgacccctccaacccctcctcagactgctcagccaccccttccagggcccccacctgcagcagtggaaatggcaatgcagattcagagagcagcggagacgcagcgccagatggcccacgtgcaaatttttcaaaggccaatccaacaccagatgcccccgatgactcccatggcccccatgggtatgaacccacctcccatgaccagaggtcccagtgggcatttggagccagggatgggaccgacagggatgcagcaacagccaccctggagccaaggaggattgcctcagccccagcaactacagtctgggatgccaaggccagccatgatgtcagtggcccagcatggtcaacctttgaacatggctccacaaccaggattgggccaggtaggtatcagcccactcaaaccaggcactgtgtctcaacaagccttacaaaaccttttgcggactctcaggtctcccagctctcccctgcagcagcaacaggtgcttagtatccttcacgccaacccccagctgttggctgcattcatcaagcagcgggctgccaagtatgccaactctaatccacaacccatccctgggcagcctggcatgccccaggggcagccagggctacagccacctaccatgccaggtcagcagggggtccactccaatccagccatgcagaacatgaatccaatgcaggcgggcgttcagagggctggcctgccccagcagcaaccacagcagcaactccagccacccatgggagggatgagcccccaggctcagcagatgaacatgaaccacaacaccatgccttcacaattccgagacatcttgagacgacagcaaatgatgcaacagcagcagcaacagggagcagggccaggaataggccctggaatggccaaccataaccagttccagcaaccccaaggagttggctacccaccacagcagcagcagcggatgcagcatcacatgcaacagatgcaacaaggaaatatgggacagataggccagcttccccaggccttgggagcagaggcaggtgccagtctacaggcctatcagcagcgactccttcagcaacagatggggtcccctgttcagcccaaccccatgagcccccagcagcatatgctcccaaatcaggcccagtccccacacctacaaggccagcagatccctaattctctctccaatcaagtgcgctctccccagcctgtcccttctccacggccacagtcccagcccccccactccagtccttccccaaggatgcagcctcagccttctccacaccacgtttccccacagacaagttccccacatcctggactggtagctgcccaggccaaccccatggaacaagggcattttgccagcccggaccagaattcaatgctttctcagcttgctagcaatccaggcatggcaaacctccatggtgcaagcgccacggacctgggactcagcaccgataactcagacttgaattcaaacctctcacagagtacactagacatacactag

SEQ ID NO: 64 - DNA, 2931 bp, Homo sapiens
atggagctccaggcagcccgcgcctgcttcgccctgctgtggggctgtgcgctggccgcggccgcggcggcgcagggcaaggaagtggtactgctggactttgctgcagctggaggggagctcggctggctcacacacccgtatggcaaagggtgggacctgatgcagaacatcatgaatgacatgccgatctacatgtactccgtgtgcaacgtgatgtctggcgaccaggacaactggctccgcaccaactgggtgtaccgaggagaggctgagcgtatcttcattgagctcaagtttactgtacgtgactgcaacagcttccctggtggcgccagctcctgcaaggagactttcaacctctactatgccgagtcggacctggactacggcaccaacttccagaagcgcctgttcaccaagattgacaccattgcgcccgatgagatcaccgtcagcagcgacttcgaggcacgccacgtgaagctgaacgtggaggagcgctccgtggggccgctcacccgcaaaggcttctacctggccttccaggatatcggtgcctgtgtggcgctgctctccgtccgtgtctactacaagaagtgccccgagctgctgcagggcctggcccacttccctgagaccatcgccggctctgatgcaccttccctggccactgtggccggcacctgtgtggaccatgccgtggtgccaccggggggtgaagagccccgtatgcactgtgcagtggatggcgagtggctggtgcccattgggcagtgcctgtgccaggcaggctacgagaaggtggaggatgcctgccaggcctgctcgcctggattttttaagtttgaggcatctgagagcccctgcttggagtgccctgagcacacgctgccatcccctgagggtgccacctcctgcgagtgtgaggaaggcttcttccgggcacctcaggacccagcgtcgatgccttgcacacgacccccctccgccccacactacctcacagccgtgggcatgggtgccaaggtggagctgcgctggacgccccctcaggacagcgggggccgcgaggacattgtctacagcgtcacctgcgaacagtgctggcccgagtctggggaatgcgggccgtgtgaggccagtgtgcgctactcggagcctcctcacggactgacccgcaccagtgtgacagtgagcgacctggagccccacatgaactacaccttcaccgtggaggcccgcaatggcgtctcaggcctggtaaccagccgcagcttccgtactgccagtgtcagcatcaaccagacagagccccccaaggtgaggctggagggccgcagcaccacctcgcttagcgtctcctggagcatccccccgccgcagcagagccgagtgtggaagtacgaggtcacttaccgcaagaagggagactccaacagctacaatgtgcgccgcaccgagggtttctccgtgaccctggacgacctggccccagacaccacctacctggtccaggtgcaggcactgacgcaggagggccagggggccggcagcaaggtgcacgaattccagacgctgtccccggagggatctggcaacttggcggtgattggcggcgtggctgtcggtgtggtcctgcttctggtgctggcaggagttggcttctttatccaccgcaggaggaagaaccagcgtgcccgccagtccccggaggacgtttacttctccaagtcagaacaactgaagcccctgaagacatacgtggacccccacacatatgaggaccccaaccaggctgtgttgaagttcactaccgagatccatccatcctgtgtcactcggcagaaggtgatcggagcaggagagtttggggaggtgtacaagggcatgctgaagacatcctcggggaagaaggaggtgccggtggccatcaagacgctgaaagccggctacacagagaagcagcgagtggacttcctcggcgaggccggcatcatgggccagttcagccaccacaacatcatccgcctagagggcgtcatctccaaatacaagcccatgatgatcatcactgagtacatggagaatggggccctggacaagttccttcgggagaaggatggcgagttcagcgtgctgcagctggtgggcatgctgcggggcatcgcagctggcatgaagtacctggccaacatgaactatgtgcaccgtgacctggctgcccgcaacatcctcgtcaacagcaacctggtctgcaaggtgtctgactttggcctgtcccgcgtgctggaggacgaccccgaggccacctacaccaccagtggcggcaagatccccatccgctggaccgccccggaggccatttcctaccggaagttcacctctgccagcgacgtgtggagctttggcattgtcatgtgggaggtgatgacctatggcgagcggccctactgggagttgtccaaccacgaggtgatgaaagccatcaatgatggcttccggctccccacacccatggactgcccctccgccatctaccagctcatgatgcagtgctggcagcaggagcgtgcccgccgccccaagttcgctgacatcgtcagcatcctggacaagctcattcgtgcccctgactccctcaagaccctggctgactttgacccccgcgtgtctatccggctccccagcacgagcggctcggagggggtgcccttccgcacggtgtccgagtggctggagtccatcaagatgcagcagtatacggagcacttcatggcggccggctacactgccatcgagaaggtggtgcagatgaccaacgacgacatcaagaggattggggtgcggctgcccggccaccagaagcgcatcgcctacagcctgctgggactcaaggaccaggtgaacactgtggggatccccatctga

SEQ ID NO: 65 - DNA, 3678 bp, Homo sapiens
atgaagctgcggctccctgccagtcccgagacccacctggacatgctccgccacctctaccagggctgccaggtggtgcagggaaacctggaactcacctacctgcccaccaatgccagcctgtccttcctgcaggatatccaggaggtgcagggctacgtgctcatcgctcacaaccaagtgaggcaggtcccactgcagaggctgcggattgtgcgaggcacccagctctttgaggacaactatgccctggccgtgctagacaatggagacccgctgaacaataccacccctgtcacaggggcctccccaggaggcctgcgggagctgcagcttcgaagcctcacagagatcttgaaaggaggggtcttgatccagcggaacccccagctctgctaccaggacacgattttgtggaaggacatcttccacaagaacaaccagctggctctcacactgatagacaccaaccgctctcgggcctgccacccctgttctccgatgtgtaagggctcccgctgctggggagagagttctgaggattgtcagagcctgacgcgcactgtctgtgccggtggctgtgcccgctgcaaggggccactgcccactgactgctgccatgagcagtgtgctgccggctgcacgggccccaagcactctgactgcctggcctgcctccacttcaaccacagtggcatctgtgagctgcactgcccagccctggtcacctacaacacagacacgtttgagtccatgcccaatcccgagggccggtatacattcggcgccagctgtgtgactgcctgtccctacaactacctttctacggacgtgggatcctgcaccctcgtctgccccctgcacaaccaagaggtgacagcagaggatggaacacagcggtgtgagaagtgcagcaagccctgtgcccgagtgtgctatggtctgggcatggagcacttgcgagaggtgagggcagttaccagtgccaatatccaggagtttgctggctgcaagaagatctttgggagcctggcatttctgccggagagctttgatggggacccagcctccaacactgccccgctccagccagagcagctccaagtgtttgagactctggaagagatcacaggttacctatacatctcagcatggccggacagcctgcctgacctcagcgtcttccagaacctgcaagtaatccggggacgaattctgcacaatggcgcctactcgctgaccctgcaagggctgggcatcagctggctggggctgcgctcactgagggaactgggcagtggactggccctcatccaccataacacccacctctgcttcgtgcacacggtgccctgggaccagctctttcggaacccgcaccaagctctgctccacactgccaaccggccagaggacgagtgtgtgggcgagggcctggcctgccaccagctgtgcgcccgagggcactgctggggtccagggcccacccagtgtgtcaactgcagccagttccttcggggccaggagtgcgtggaggaatgccgagtactgcaggggctccccagggagtatgtgaatgccaggcactgtttgccgtgccaccctgagtgtcagccccagaatggctcagtgacctgttttggaccggaggctgaccagtgtgtggcctgtgcccactataaggaccctcccttctgcgtggcccgctgccccagcggtgtgaaacctgacctctcctacatgcccatctggaagtttccagatgaggagggcgcatgccagccttgccccatcaactgcacccactcctgtgtggacctggatgacaagggctgccccgccgagcagagagccagccctctgacgtccatcatctctgcggtggttggcattctgctggtcgtggtcttgggggtggtctttgggatcctcatcaagcgacggcagcagaagatccggaagtacacgatgcggagactgctgcaggaaacggagctggtggagccgctgacacctagcggagcgatgcccaaccaggcgcagatgcggatcctgaaagagacggagctgaggaaggtgaaggtgcttggatctggcgcttttggcacagtctacaagggcatctggatccctgatggggagaatgtgaaaattccagtggccatcaaagtgttgagggaaaacacatcccccaaagccaacaaagaaatcttagacgaagcatacgtgatggctggtgtgggctccccatatgtctcccgccttctgggcatctgcctgacatccacggtgcagctggtgacacagcttatgccctatggctgcctcttagaccatgtccgggaaaaccgcggacgcctgggctcccaggacctgctgaactggtgtatgcagattgccaaggggatgagctacctggaggatgtgcggctcgtacacagggacttggccgctcggaacgtgctggtcaagagtcccaaccatgtcaaaattacagacttcgggctggctcggctgctggacattgacgagacagagtaccatgcagatgggggcaaggtgcccatcaagtggatggcgctggagtccattctccgccggcggttcacccaccagagtgatgtgtggagttatggtgtgactgtgtgggagctgatgacttttggggccaaaccttacgatgggatcccagcccgggagatccctgacctgctggaaaagggggagcggctgccccagccccccatctgcaccattgatgtctacatgatcatggtcaaatgttggatgattgactctgaatgtcggccaagattccgggagttggtgtctgaattctcccgcatggccagggacccccagcgctttgtggtcatccagaatgaggacttgggcccagccagtcccttggacagcaccttctaccgctcactgctggaggacgatgacatgggggacctggtggatgctgaggagtatctggtaccccagcagggcttcttctgtccagaccctgccccgggcgctgggggcatggtccaccacaggcaccgcagctcatctaccaggagtggcggtggggacctgacactagggctggagccctctgaagaggaggcccccaggtctccactggcaccctccgaaggggctggctccgatgtatttgatggtgacctgggaatgggggcagccaaggggctgcaaagcctccccacacatgaccccagccctctacagcggtacagtgaggaccccacagtacccctgccctctgagactgatggctacgttgcccccctgacctgcagcccccagcctgaatatgtgaaccagccagatgttcggccccagcccccttcgccccgagagggccctctgcctgctgcccgacctgctggtgccactctggaaaggcccaagactctctccccagggaagaatggggtcgtcaaagacgtttttgcctttgggggtgccgtggagaaccccgagtacttgacaccccagggaggagctgcccctcagccccaccctcctcctgccttcagcccagccttcgacaacctctattactgggaccaggacccaccagagcggggggctccacccagcaccttcaaagggacacctacggcagagaacccagagtacctgggtctggacgtgccagtgtga

SEQ ID NO: 66 - DNA, 4029 bp, Homo sapiens
atgagggcgaacgacgctctgcaggtgctgggcttgcttttcagcctggcccggggctccgaggtgggcaactctcaggcagtgtgtcctgggactctgaatggcctgagtgtgaccggcgatgctgagaaccaataccagacactgtacaagctctacgagaggtgtgaggtggtgatggggaaccttgagattgtgctcacgggacacaatgccgacctctccttcctgcagtggattcgagaagtgacaggctatgtcctcgtggccatgaatgaattctctactctaccattgcccaacctccgcgtggtgcgagggacccaggtctacgatgggaagtttgccatcttcgtcatgttgaactataacaccaactccagccacgctctgcgccagctccgcttgactcagctcaccgagattctgtcagggggtgtttatattgagaagaacgataagctttgtcacatggacacaattgactggagggacatcgtgagggaccgagatgctgagatagtggtgaaggacaatggcagaagctgtcccccctgtcatgaggtttgcaaggggcgatgctggggtcctggatcagaagactgccagacattgaccaagaccatctgtgctcctcagtgtaatggtcactgctttgggcccaaccccaaccagtgctgccatgatgagtgtgccgggggctgctcaggccctcaggacacagactgctttgcctgccggcacttcaatgacagtggagcctgtgtacctcgctgtccacagcctcttgtctacaacaagctaactttccagctggaacccaatccccacaccaagtatcagtatggaggagtttgtgtagccagctgtccccataactttgtggtggatcaaacatcctgtgtcagggcctgtcctcctgacaagatggaagtagataaaaatgggctcaagatgtgtgagccttgtgggggactatgtcccaaagcctgtgagggaacaggctctgggagccgcttccagactgtggactcgagcaacattgatggatttgtgaactgcaccaagatcctgggcaacctggactttctgatcaccggcctcaatggagacccctggcacaagatccctgccctggacccagagaagctcaatgtcttccggacagtacgggagatcacaggttacctgaacatccagtcctggccgccccacatgcacaacttcagtgttttttccaatttgacaaccattggaggcagaagcctctacaaccggggcttctcattgttgatcatgaagaacttgaatgtcacatctctgggcttccgatccctgaaggaaattagtgctgggcgtatctatataagtgccaataggcagctctgctaccaccactctttgaactggaccaaggtgcttcgggggcctacggaagagcgactagacatcaagcataatcggccgcgcagagactgcgtggcagagggcaaagtgtgtgacccactgtgctcctctgggggatgctggggcccaggccctggtcagtgcttgtcctgtcgaaattatagccgaggaggtgtctgtgtgacccactgcaactttctgaatggggagcctcgagaatttgcccatgaggccgaatgcttctcctgccacccggaatgccaacccatggagggcactgccacatgcaatggctcgggctctgatacttgtgctcaatgtgcccattttcgagatgggccccactgtgtgagcagctgcccccatggagtcctaggtgccaagggcccaatctacaagtacccagatgttcagaatgaatgtcggccctgccatgagaactgcacccaggggtgtaaaggaccagagcttcaagactgtttaggacaaacactggtgctgatcggcaaaacccatctgacaatggctttgacagtgatagcaggattggtagtgattttcatgatgctgggcggcacttttctctactggcgtgggcgccggattcagaataaaagggctatgaggcgatacttggaacggggtgagagcatagagcctctggaccccagtgagaaggctaacaaagtcttggccagaatcttcaaagagacagagctaaggaagcttaaagtgcttggctcgggtgtctttggaactgtgcacaaaggagtgtggatccctgagggtgaatcaatcaagattccagtctgcattaaagtcattgaggacaagagtggacggcagagttttcaagctgtgacagatcatatgctggccattggcagcctggaccatgcccacattgtaaggctgctgggactatgcccagggtcatctctgcagcttgtcactcaatatttgcctctgggttctctgctggatcatgtgagacaacaccggggggcactggggccacagctgctgctcaactggggagtacaaattgccaagggaatgtactaccttgaggaacatggtatggtgcatagaaacctggctgcccgaaacgtgctactcaagtcacccagtcaggttcaggtggcagattttggtgtggctgacctgctgcctcctgatgataagcagctgctatacagtgaggccaagactccaattaagtggatggcccttgagagtatccactttgggaaatacacacaccagagtgatgtctggagctatggtgtgacagtttgggagttgatgaccttcggggcagagccctatgcagggctacgattggctgaagtaccagacctgctagagaagggggagcggttggcacagccccagatctgcacaattgatgtctacatggtgatggtcaagtgttggatgattgatgagaacattcgcccaacctttaaagaactagccaatgagttcaccaggatggcccgagacccaccacggtatctggtcataaagagagagagtgggcctggaatagcccctgggccagagccccatggtctgacaaacaagaagctagaggaagtagagctggagccagaactagacctagacctagacttggaagcagaggaggacaacctggcaaccaccacactgggctccgccctcagcctaccagttggaacacttaatcggccacgtgggagccagagccttttaagtccatcatctggatacatgcccatgaaccagggtaatcttggggagtcttgccaggagtctgcagtttctgggagcagtgaacggtgcccccgtccagtctctctacacccaatgccacggggatgcctggcatcagagtcatcagaggggcatgtaacaggctctgaggctgagctccaggagaaagtgtcaatgtgtaggagccggagcaggagccggagcccacggccacgcggagatagcgcctaccattcccagcgccacagtctgctgactcctgttaccccactctccccacccgggttagaggaagaggatgtcaacggttatgtcatgccagatacacacctcaaaggtactccctcctcccgggaaggcaccctttcttcagtgggtctcagttctgtcctgggtactgaagaagaagatgaagatgaggagtatgaatacatgaaccggaggagaaggcacagtccacctcatccccctaggccaagttcccttgaggagctgggttatgagtacatggatgtggggtcagacctcagtgcctctctgggcagcacacagagttgcccactccaccctgtacccatcatgcccactgcaggcacaactccagatgaagactatgaatatatgaatcggcaacgagatggaggtggtcctgggggtgattatgcagccatgggggcctgcccagcatctgagcaagggtatgaagagatgagagcttttcaggggcctggacatcaggccccccatgtccattatgcccgcctaaaaactctacgtagcttagaggctacagactctgcctttgataaccctgattactggcatagcaggcttttccccaaggctaatgcccagagaacgtaa

SEQ ID NO: 67 - DNA, 2283 bp, Homo sapiens
atgaagctcaacgtggacgggctcctggtctacttcccgtacgactacatctaccccgagcagttctcctacatgcgggagctcaaacgcacgctggacgccaagggtcatggagtcctggagatgccctcaggcaccgggaagacagtatccctgttggccctgatcatggcataccagagagcatatccgctggaggtgaccaaactcatctactgctcaagaactgtgccagagattgagaaggtgattgaagagcttcgaaagttgctcaacttctatgagaagcaggagggcgagaagctgccgtttctgggactggctctgagctcccgcaaaaacttgtgtattcaccctgaggtgacacccctgcgctttgggaaggacgtcgatgggaaatgccacagcctcacagcctcctatgtgcgggcgcagtaccagcatgacaccagcctgccccactgccgattctatgaggaatttgatgcccatgggcgtgaggtgcccctccccgctggcatctacaacctggatgacctgaaggccctggggcggcgccagggctggtgcccatacttccttgctcgatactcaatcctgcatgccaatgtggtggtttatagctaccactacctcctggaccccaagattgcagacctggtgtccaaggaactggcccgcaaggccgtcgtggtcttcgacgaggcccacaacattgacaacgtctgcatcgactccatgagcgtcaacctcacccgccggacccttgaccggtgccagggcaacctggagaccctgcagaagacggtgctcaggatcaaagagacagacgagcagcgcctgcgggacgagtaccggcgtctggtggaggggctgcgggaggccagcgccgcccgggagacggacgcccacctggccaaccccgtgctgcccgacgaagtgctgcaggaggcagtgcctggctccatccgcacggccgagcatttcctgggcttcctgaggcggctgctggagtacgtgaagtggcggctgcgtgtgcagcatgtggtgcaggagagcccgcccgccttcctgagcggcctggcccagcgcgtgtgcatccagcgcaagcccctcagattctgtgctgaacgcctccggtccctgctgcatactctggagatcaccgaccttgctgacttctccccgctcaccctccttgctaactttgccacccttgtcagcacctacgccaaaggcttcaccatcatcatcgagccctttgacgacagaaccccgaccattgccaaccccatcctgcacttcagctgcatggacgcctcgctggccatcaaacccgtatttgagcgtttccagtctgtcatcatcacatctgggacactgtccccgctggacatctaccccaagatcctggacttccaccccgtcaccatggcaaccttcaccatgacgctggcacgggtctgcctctgccctatgatcatcggccgtggcaatgaccaggtggccatcagctccaaatttgagacccgggaggatattgctgtgatccggaactatgggaacctcctgctggagatgtccgctgtggtccctgatggcatcgtggccttcttcaccagctaccagtacatggagagcaccgtggcctcctggtatgagcaggggatccttgagaacatccagaggaacaagctgctctttattgagacccaggatggtgccgaaaccagtgtcgccctggagaagtaccaggaggcctgcgagaatggccgcggggccatcctgctgtcagtggcccggggcaaagtgtccgagggaatcgactttgtgcaccactacgggcgggccgtcatcatgtttggcgtcccctacgtctacacacagagccgcattctcaaggcgcggctggaatacctgcgggaccagttccagattcgtgagaatgactttcttaccttcgatgccatgcgccacgcggcccagtgtgtgggtcgggccatcaggggcaagacggactacggcctcatggtctttgccgacaagcggtttgcccgtggggacaagcgggggaagctgccccgctggatccaggagcacctcacagatgccaacctcaacctgaccgtggacgagggtgtccaggtggccaagtacttcctgcggcagatggcacagcccttccaccgggaggatcagctgggcctgtccctgctcagcctggagcagctagaatcagaggagacgctgaagaggatagagcagattgctcagcagctctga

SEQ ID NO: 68 - DNA, 2256 bp, Homo sapiens
atgggccagactgggaagaaatctgagaagggaccagtttgttggcggaagcgtgtaaaatcagagtacatgcgactgagacagctcaagaggttcagacgagctgatgaagtaaagagtatgtttagttccaatcgtcagaaaattttggaaagaacggaaatcttaaaccaagaatggaaacagcgaaggatacagcctgtgcacatcctgacttctgtgagctcattgcgcgggactagggagtgttcggtgaccagtgacttggattttccaacacaagtcatcccattaaagactctgaatgcagttgcttcagtacccataatgtattcttggtctcccctacagcagaattttatggtggaagatgaaactgttttacataacattccttatatgggagatgaagttttagatcaggatggtactttcattgaagaactaataaaaaattatgatgggaaagtacacggggatagagaatgtgggtttataaatgatgaaatttttgtggagttggtgaatgcccttggtcaatataatgatgatgacgatgatgatgatggagacgatcctgaagaaagagaagaaaagcagaaagatctggaggatcaccgagatgataaagaaagccgcccacctcggaaatttccttctgataaaatttttgaagccatttcctcaatgtttccagataagggcacagcagaagaactaaaggaaaaatataaagaactcaccgaacagcagctcccaggcgcacttcctcctgaatgtacccccaacatagatggaccaaatgctaaatctgttcagagagagcaaagcttacactcctttcatacgcttttctgtaggcgatgttttaaatatgactgcttcctacatcgtaagtgcaattattcttttcatgcaacacccaacacttataagcggaagaacacagaaacagctctagacaacaaaccttgtggaccacagtgttaccagcatttggagggagcaaaggagtttgctgctgctctcaccgctgagcggataaagaccccaccaaaacgtccaggaggccgcagaagaggacggcttcccaataacagtagcaggcccagcacccccaccattaatgtgctggaatcaaaggatacagacagtgatagggaagcagggactgaaacggggggagagaacaatgataaagaagaagaagagaagaaagatgaaacttcgagctcctctgaagcaaattctcggtgtcaaacaccaataaagatgaagccaaatattgaacctcctgagaatgtggagtggagtggtgctgaagcctcaatgtttagagtcctcattggcacttactatgacaatttctgtgccattgctaggttaattgggaccaaaacatgtagacaggtgtatgagtttagagtcaaagaatctagcatcatagctccagctcccgctgaggatgtggatactcctccaaggaaaaagaagaggaaacaccggttgtgggctgcacactgcagaaagatacagctgaaaaaggacggctcctctaaccatgtttacaactatcaaccctgtgatcatccacggcagccttgtgacagttcgtgcccttgtgtgatagcacaaaatttttgtgaaaagttttgtcaatgtagttcagagtgtcaaaaccgctttccgggatgccgctgcaaagcacagtgcaacaccaagcagtgcccgtgctacctggctgtccgagagtgtgaccctgacctctgtcttacttgtggagccgctgaccattgggacagtaaaaatgtgtcctgcaagaactgcagtattcagcggggctccaaaaagcatctattgctggcaccatctgacgtggcaggctgggggatttttatcaaagatcctgtgcagaaaaatgaattcatctcagaatactgtggagagattatttctcaagatgaagctgacagaagagggaaagtgtatgataaatacatgtgcagctttctgttcaacttgaacaatgattttgtggtggatgcaacccgcaagggtaacaaaattcgttttgcaaatcattcggtaaatccaaactgctatgcaaaagttatgatggttaacggtgatcacaggataggtatttttgccaagagagccatccagactggcgaagagctgttttttgattacagatacagccaggctgatgccctgaagtatgtcggcatcgaaagagaaatggaaatcccttga

SEQ ID NO: 69 - DNA, 1761 bp, Homo sapiens
atgccgaaaccaatcaatgtccgagttaccaccatggatgcagagctggagtttgcaatccagccaaatacaactggaaaacagctttttgatcaggtggtaaagactatcggcctccgggaagtgtggtactttggcctccactatgtggataataaaggatttcctacctggctgaagctggataagaaggtgtctgcccaggaggtcaggaaggagaatcccctccagttcaagttccgggccaagttctaccctgaagatgtggctgaggagctcatccaggacatcacccagaaacttttcttcctccaagtgaaggaaggaatccttagcgatgagatctactgcccccctgagactgccgtgctcttggggtcctacgctgtgcaggccaagtttggggactacaacaaagaagtgcacaagtctgggtacctcagctctgagcggctgatccctcaaagagtgatggaccagcacaaacttaccagggaccagtgggaggaccggatccaggtgtggcatgcggaacaccgtgggatgctcaaagataatgctatgttggaatacctgaagattgctcaggacctggaaatgtatggaatcaactatttcgagataaaaaacaagaaaggaacagacctttggcttggagttgatgcccttggactgaatatttatgagaaagatgataagttaaccccaaagattggctttccttggagtgaaatcaggaacatctctttcaatgacaaaaagtttgtcattaaacccatcgacaagaaggcacctgactttgtgttttatgccccacgtctgagaatcaacaagcggatcctgcagctctgcatgggcaaccatgagttgtatatgcgccgcaggaagcctgacaccatcgaggtgcagcagatgaaggcccaggcccgggaggagaagcatcagaagcagctggagcggcaacagctggaaacagagaagaaaaggagagaaaccgtggagagagagaaagagcagatgatgcgcgagaaggaggagttgatgctgcggctgcaggactatgaggagaagacaaagaaggcagagagagagctctcggagcagattcagagggccctgcagctggaggaggagaggaagcgggcacaggaggaggccgagcgcctagaggctgaccgtatggctgcactgcgggctaaggaggagctggagagacaggcggtggatcagataaagagccaggagcagctggctgcggagcttgcagaatacactgccaagattgccctcctggaagaggcgcggaggcgcaaggaggatgaagttgaagagtggcagcacagggccaaagaagcccaggatgacctggtgaagaccaaggaggagctgcacctggtgatgacagcacccccgcccccaccaccccccgtgtacgagccggtgagctaccatgtccaggagagcttgcaggatgagggcgcagagcccacgggctacagcgcggagctgtctagtgagggcatccgggatgaccgcaatgaggagaagcgcatcactgaggcagagaagaacgagcgtgtgcagcggcagctgctgacgctgagcagcgagctgtcccaggcccgagatgagaataagaggacccacaatgacatcatccacaacgagaacatgaggcaaggccgggacaagtacaagacgctgcggcagatccggcagggcaacaccaagcagcgcatcgacgagttcgaggccctgtaa

SEQ ID NO: 70 - DNA, 1176 bp, Homo sapiens
atggcagaggagagcagctgtaccagggattgcatgtccttcagcgtgctcaactgggatcaggttagccggctgcatgaggtcctcactgaagttgtacctatccacggacgaggcaactttccaaccttggagataactctgaaggacatcgtccagaccgtccgcagtcggctggaggaggcaggcatcaaagtgcacgacgtccggctgaatggctccgcagctggccacgttttggtcaaagacaatggcttgggctgcaaagacctggacctaatcttccatgtggctcttccaacagaggcagaatttcagctggttagagatgtggttctgtgttcccttctgaacttcctgccagagggtgtgaacaagctcaaaatcagtccagtcactctgaaggaggcatatgtgcagaagctagtgaaggtttgcacggacactgaccgctggagcctgatctccctctccaacaagaacgggaagaacgtggagctgaagtttgtcgactccattcggcgtcagtttgagttcagtgtggactctttccaaatcatcctggattctttgcttttcttctatgactgttccaataatcccatctctgagcacttccaccccaccgtgattggggagagcatgtacggggactttgaggaagcttttgaccatctgcagaacagactgatcgccaccaagaacccagaagaaatcagaggcgggggacttctcaagtacagcaaccttcttgtgcgggacttcaggcccacagaccaggaagaaatcaaaactctagagcgctacatgtgctccaggttcttcatcgacttcccggacatccttgaacagcagaggaagttggagacttaccttcaaaaccacttcgctgaagaagagagaagcaagtacgactacctcatgatccttcgcagggtggtgaacgagagcaccgtgtgtctcatggggcatgaacgcaggcagactctgaacctcatctccctcctggccttgcgtgtgctggcggaacaaaacatcatccccagtgccaccaacgtcacctgttactaccagccggccccttacgtcagtgatggcaacttcagcaactactacgttgcccatcctccagtcacctacagccagccttaccctacctggctgccctgtaactaa

SEQ ID NO: 71 - DNA, 13767 bp, Homo sapiens
atggggagacatttggctttgctcctgcttctgctccttctcttccaacattttggagacagtgatggcagccaacgacttgaacagactcctctgcagtttacacacctcgagtacaacgtcaccgtgcaggagaactctgcagctaagacttatgtggggcatcctgtcaagatgggtgtttacattacacatccagcgtgggaagtaaggtacaaaattgtttccggagacagtgaaaacctgttcaaagctgaagagtacattctcggagacttttgctttctaagaataaggaccaaaggaggaaatacagctattcttaatagagaagtgaaggatcactacacattgatagtgaaagcacttgaaaaaaatactaatgtggaggcgcgaacaaaggtcagggtgcaggtgctggatacaaatgacttgagaccgttattctcacccacctcatacagcgtttctttacctgaaaacacagctataaggaccagtatcgcaagagtcagcgccacggatgcagacataggaaccaacggggaattttactacagttttaaagatcgaacagatatgtttgctattcacccaaccagtggtgtgatagtgttaactggtagacttgattacctagagaccaagctctatgagatggaaatcctcgctgcggaccgtggcatgaagttgtatgggagcagtggcatcagcagcatggccaagctaacggtgcacatcgaacaggccaatgaatgtgctccggtgataacagcagtgacattgtcaccatcagaactggacagggacccagcatatgcaattgtgacagtggatgactgcgatcagggtgccaatggtgacatagcatctttaagcatcgtggcaggtgaccttctccagcagtttagaacagtgaggtcctttccagggagtaaggagtataaagtcaaagccatcggtggcattgattgggacagtcatcctttcggctacaatctcacactacaggctaaagataaaggaactccgccccagttctcttctgttaaagtcattcacgtgacttctccacagttcaaagccgggccagtcaagtttgaaaaggatgtttacagagcagaaataagtgaatttgctcctcccaacacacctgtggtcatggtaaaggccattcctgcttattcccatttgaggtatgtttttaaaagtacacctggaaaagctaaattcagtttaaattacaacactggtctcatttctattttagaaccagttaaaagacagcaggcagcccattttgaacttgaagtaacaacaagtgacagaaaagcgtccaccaaggtcttggtgaaagtcttaggtgcaaatagcaatccccctgaatttacccagacagcgtacaaagctgcttttgatgagaacgtgcccattggtactactgtcatgagcctgagtgccgtagaccctgatgagggtgagaacgggtacgtgacatacagtatcgcaaatttaaatcatgtgccgtttgcgattgaccatttcactggtgccgtgagtacgtcagaaaacctggactacgaactgatgcctcgggtttatactctgaggattcgtgcatcagactggggcttgccgtaccgccgggaagtcgaagtccttgctacaattactctcaataacttgaatgacaacacacctttgtttgagaaaataaattgtgaagggacaattcccagagatctaggcgtgggagagcaaataaccactgtttctgctattgatgcagatgaacttcagttggtacagtatcagattgaagctggaaatgaactggatttctttagtttaaaccccaactcgggggtattgtcattaaagcgatcgctaatggatggcttaggtgcaaaggtgtctttccacagtctgagaatcacagctacagatggagaaaattttgccacaccattatatatcaacataacagtggctgccagtcacaagctggtaaacttgcagtgtgaagagactggtgttgccaaaatgctggcagagaagctcctgcaggcaaataaattacacaaccagggagaggtggaggatattttcttcgattctcactctgtcaatgctcacataccgcagtttagaagcactcttccgactggtattcaggtaaaggaaaaccagcctgtgggttccagtgtaattttcatgaactccactgaccttgacactggcttcaatggaaaactggtctatgctgtttctggaggaaatgaggatagttgcttcatgattgatatggaaacaggaatgctgaaaattttatctcctcttgaccgtgaaacaacagacaaatacaccctgaatattaccgtctatgaccttgggataccccagaaggctgcgtggcgtcttctacatgtcgtggttgtcgatgccaatgataatccacccgagtttttacaggagagctattttgtggaagtgagtgaagacaaggaggtacatagtgaaatcatccaggttgaagccacagataaagacctggggcccaacggacacgtgacgtactcaattgttacagacacagacacattttcaattgacagcgtgacgggtgttgttaacatcgcacgccctctggatcgagagctgcagcatgagcactccttaaagattgaggccagggaccaagccagagaagagcctcagctgttctccactgtcgttgtgaaagtatcactagaagatgttaatgacaacccacctacatttattccacctaattatcgtgtgaaagtccgagaggatcttccagaaggaaccgtcatcatgtggttagaagcccacgatcctgatttaggtcagtctggtcaggtgagatacagccttctggaccacggagaaggaaacttcgatgtggataaactcagtggagcagttaggatcgtccagcagttggactttgagaagaagcaagtgtataatctcactgtgagggccaaagacaagggaaagccagtttctctgtcttctacttgctatgttgaagttgaggtggttgatgtgaatgagaacctgcacccacccgtgttttccagctttgtggaaaaggggacagtgaaagaagatgcacctgttggttcattggtaatgacggtgtcggctcatgatgaggacgccagaagagatggggagatccgatactccattagagatggctctggcgttggtgttttcaaaataggtgaagagacaggtgtcatagagacgtcagatcgactggaccgtgaatcgacctcccattattggctaacagtctttgcaaccgatcagggtgtcgtgcctctttcatcgttcatagagatctacatagaggttgaggatgtcaatgacaatgcaccacagacatcagagcctgtttattacccagaaatcatggaaaattctcctaaagatgtatctgtggtccagatcgaggcatttgatccagattcgagctctaatgacaagctcatgtacaaaattacaagtggaaatccacaaggattcttttcaatacatcctaaaacaggtctcatcacaactacgtcaaggaagctagaccgagaacagcaagatgaacacatattagaggttactgtgacagacaatggtagtccccccaaatcaaccattgcaagagtcattgtgaaaatccttgatgaaaatgacaacaaacctcagtttctgcaaaagttctacaaaatcagactccctgagcgggaaaagccagaccgagaaagaaatgccagacgggagccgctctatcacgtcatagccaccgacaaggatgagggccccaatgcagaaatctcctacagcatcgaagacgggaatgagcatggcaaatttttcatcgaaccgaaaactggagtggtttcgtccaagaggttttcagcagctggagaatatgatattctttcaattaaggcagttgacaatggtcgccctcaaaagtcatcaaccaccagactccatattgaatggatctccaagcccaaaccgtccctggagcccatttcatttgaagaatcattttttacctttactgtgatggaaagtgaccccgttgctcacatgattggagtaatatctgtggagcctcctggcatacccctttggtttgacatcactggtggcaactacgacagtcacttcgatgtggacaagggaactggaaccatcattgttgccaaacctcttgatgcagaacagaagtcaaactacaacctcacagtcgaggctacagatggaaccaccactatcctcactcaggtattcatcaaagtaatagacacaaatgaccatcgtcctcagttttctacatcaaagtatgaagttgttattcctgaagatacagcgccagaaacagaaattttgcaaatcagtgctgtggatcaggatgagaaaaacaaactaatctacactctgcagagcagtagagatccactgagtctcaagaaatttcgtcttgatcctgcaaccggctctctctatacttctgagaaactggatcatgaagctgttcaccagcacaccctcacggtcatggtacgagatcaagatgtgcctgtaaaacgcaactttgcaaggattgtggtcaatgtcagcgacacgaatgaccacgccccgtggttcaccgcttcctcctacaaagggcgggtttatgaatcggcagccgttggctcagttgtgttgcaggtgacggctctggacaaggacaaagggaaaaatgctgaagtgctgtactcgatcgagtcaggaaatattggaaattcttttatgattgatcctgtcttgggctctattaaaactgccaaagaattagatcgaagtaaccaagcggagtatgatttaatggtaaaagctacagataagggcagtccaccaatgagtgaaataacttctgtgcgtatctttgtcacaattgctgacaacgcctctccgaagtttacatcaaaagaatattctgttgaacttagtgaaactgtcagcattgggagtttcgttgggatggttacagcccatagtcaatcatcagtggtgtatgaaataaaagatggaaatacaggtgatgcttttgatattaatccacattctggaactatcatcactcagaaagccctggactttgaaactttgcccatttacacattgataatacaaggaactaacatggctggtttgtccactaatacaacggttctagttcacttgcaggatgagaatgacaacgcgccagtttttatgcaggcagaatatacaggactcattagtgaatcagcctcaattaacagcgtggtcctaacagacaggaatgtcccactggtgattcgagcagctgatgctgataaagactcaaatgctttgcttgtatatcacattgttgaaccatctgtacacacatattttgctattgattctagcactggtgctattcatacagtactaagtctggactatgaagaaacaagtatttttcactttaccgtccaagtgcatgacatgggaaccccacgtttatttgctgagtatgcagcgaatgtaacagtacatgtaattgacattaatgactgcccccctgtgtttgccaagccattatatgaagcatctcttttgttaccaacatacaaaggagtaaaagtcatcacagtaaatgctacagatgctgattcaagtgcattctcacagttgatttactccatcaccgaaggcaacatcggggagaagttttctatggactacaagactggtgctctcactgtccaaaacacaactcagttaagaagccgctacgagctaaccgttagagcttccgatggcagatttgccggccttacctctgtcaaaattaatgtgaaagaaagcaaagaaagtcacctaaagtttacccaggatgtctactctgcggtagtgaaagagaattccaccgaggccgaaacattagctgtcattactgctattgggaatccaatcaatgagcctttgttttatcacatcctcaacccagatcgcagatttaaaataagccgcacttcaggagttctgtcaaccactggcacgcccttcgatcgtgagcagcaggaggcgtttgatgtggttgtagaagtgacagaggaacataagccttctgcagtggcccacgttgtcgtgaaggtcattgtagaagaccaaaatgataatgcgccggtgtttgtcaaccttccctactacgccgttgttaaagtggacactgaggtgggccatgtcattcgctatgtcactgctgtagacagagacagtggcagaaacggggaagtgcattactacctcaaggaacatcatgaacactttcaaattggacccttgggtgaaatttcactgaaaaagcaatttgagcttgacaccttaaataaagaatatcttgttacagtggttgcaaaagatggagggaacccggccttttcagcggaagttatcgttccgatcactgtcatgaataaagccatgcctgtgtttgaaaaacctttctacagtgcagagattgcagagagcatccaggtgcacagccctgtggtccacgtgcaggctaacagcccggaaggcctgaaagtgttctacagcatcacagacggagaccctttcagccagttcactattaacttcaatactggagttatcaatgtcatagctcctctggactttgaggcccacccggcatataagctgagcatacgcgcaactgactccttgacgggcgctcatgctgaagtatttgtggacatcatagtagacgacatcaatgataaccctcctgtgtttgctcagcagtcttatgcggtgaccctgtctgaggcatctgtaattggaacgtctgttgttcaagttagagccaccgattctgattcagaaccaaatagaggaatctcataccagatgtttgggaatcacagcaagagtcatgatcattttcatgtagacagcagcactggcctcatctcactactcagaaccctggattacgagcagtcccggcagcacacgatttttgtgagggcagttgatggtggtatgcccacgctgagcagtgatgtgattgtcacggtggacgttaccgacctcaatgataatccaccactctttgaacaacagatttatgaagccagaattagcgagcacgcccctcatgggcatttcgtgacctgtgtaaaagcctatgatgcagacagttcagacatagacaagttgcagtattccattctgtctggcaatgatcataaacattttgtcattgacagtgcaacagggattatcaccctctcaaacctgcaccggcacgccctgaagccattttacagtcttaacctgtcagtgtctgatggagtttttagaagttccacccaggttcatgtaactgtaattggaggcaatttgcacagtcctgctttccttcagaacgaatatgaagtggaactagctgaaaacgctcccctacataccctggtgatggaggtgaaaactacggatggggattctggtatttatggtcacgttacttaccatattgtaaatgactttgccaaagacagattttacataaatgagagaggacagatatttactttggaaaaacttgatcgagaaaccccggcggagaaagtgatctcagtccgtttaatggctaaggatgctggaggaaaagttgctttctgcaccgtgaatgtcatccttacagatgacaatgacaatgcaccacaatttcgagcaaccaaatacgaagtgaatatcgggtccagtgctgctaaagggacttcagtcgttaaagttcttgcaagtgatgccgatgagggctccaatgccgacatcacctatgccattgaagcagactctgaaagtgtaaaagagaatttggaaattaacaaactgtccggcgtaatcactacaaaggagagcctcattggcttggaaaatgaattcttcactttctttgttagagctgtggataatgggtctccatcaaaagaatctgttgttcttgtctatgttaaaatccttccaccggaaatgcagcttccaaaattttcagaacctttctatacctttacagtgtcagaggacgtgcctattggaacagagatagatctcatccgagcagaacatagtgggactgttctttacagcctggtcaaagggaatactccagaaagcaatagggatgagtcctttgtgattgacagacagagcgggagactgaagttggagaagagtcttgatcatgagacaactaagtggtatcagttttccatactggccaggtgcactcaagatgaccatgagatggtggcttctgtagatgttagtatccaagtgaaagatgcaaatgacaacagcccggtctttgaatctagtccatatgaggcattcattgttgaaaacctgccagggggaagtagagtaattcagatcagggcatctgatgctgactcaggaaccaacggccaagttatgtatagcctggatcagtcacaaagtgtggaagtcattgaatcctttgccattaacatggaaacaggctggattacaactttaaaggaacttgaccatgaaaagagagacaattaccagattaaagtggttgcatcagatcatggtgaaaagatccagctatcctccacagccattgtggatgttaccgtcaccgatgtcaacgatagtccaccacgattcacggccgagatctataaagggactgtgagtgaggatgacccccaaggtggggtgattgccatcttaagtaccacggatgctgattctgaagagatcaacagacaagttacatatttcataacaggaggggatcctttaggacagtttgccgttgaaactatacagaatgaatggaaggtatatgtgaagaaacctctagacagggaaaaaagggacaattaccttcttactatcacggcaactgatggcaccttctcatcaaaagcgatagttgaagtgaaagttctggatgcaaatgacaacagtccagtttgtgaaaagactttatattcagacactattcctgaagacgtccttcctggaaaattgatcatgcagatctctgctacagacgcagacatccgctctaacgctgaaattacttacacgttattgggttcaggtgcagaaaaattcaaactaaatccagacacaggtgaactgaaaacgtcaaccccccttgatcgtgaggagcaagctgtttatcatcttctcgtcagggccacagatggaggaggaagattctgccaagccagtattgtgctcacgctagaagatgtgaacgataacgcccccgaattctctgccgatccttatgccatcaccgtgtttgaaaacacagagccgggaacgctgctgacaagagtgcaggccacagatgccgacgcaggattaaatcggaagattttatactcactgattgactctgctgatgggcagttctccattaacgaattatctggaattattcagttagaaaaacctttggacagagaactccaggcagtatacaccctctctttgaaagctgtggatcaaggcttgccaaggaggctgactgccactggcactgtgattgtatcagttcttgacataaatgacaacccccctgtgtttgagtaccgtgaatatggtgccaccgtgtctgaggacattcttgttggaactgaagttcttcaagtgtatgcagcaagtcgggatattgaagcaaatgcagaaatcacctactcaataataagtggaaatgaacatgggaaattcagcatagattctaaaacaggggccgtatttatcattgagaatctggattatgagagctctcatgagtattacctaacagtagaggccactgatggaggcacgccttcactgagcgacgttgccactgtgaacgttaatgtaacagatatcaacgataatacccctgtgttcagccaagacacctacacgacagtcatcagtgaagatgccgttcttgagcagtctgtcatcacggttatggccgatgatgccgatggaccttccaacagccacatccactactcaattatagatggcaaccaaggaagctcgttcacaattgaccccgtcaggggagaagtcaaagtgaccaaacttctcgaccgagaaacgatttcaggttacacgctcacggttcaagcttctgataatggcagtccacccagagtcaacacgacgaccgtgaacatcgatgtgtccgatgtcaatgacaacgcgcccgtcttctccaggggaaactacagtgtcattatccaggaaaataagccagtgggcttcagcgtgctgcagctggtagtaacagatgaggattcttcccataacggtccacccttcttctttactattgtaactggaaatgatgagaaggcttttgaagttaacccgcaaggagtcctcctgacatcatctgccatcaagaggaaggagaaagatcattacttactgcaggtgaaggtggcagataatggaaagcctcagttgtcatctttgacatacattgacattagggtaattgaggagagcatctatccgcctgcgattttgcccctggagattttcatcacctcttctggagaagaatactcaggtggcgtcattgggaagatccatgccacagaccaggacgtgtatgatactctaacctacagtctcgaccctcagatggacaacctgttctctgtttccagcacagggggcaagctgatagcacacaaaaagctagacatagggcaataccttctcaatgtcagcgtaacagatgggaagttcacgacggtggccgacatcacagtgcatatcagacaagtcacacaggagatgttgaaccacaccatcgcgatccgctttgccaacctcactccggaagaattcgttggtgactactggcgcaacttccagcgagctttacggaacatcctgggtgtgaggaggaacgacatacagattgttagtttgcagtcctctgaacctcacccacatctggacgtcttactttttgtagagaaaccaggtagtgctcagatctcaacaaaacaacttctgcacaagattaactcttccgtgactgacattgaggaaatcattggagttaggatactgaatgtattccagaaactctgcgcgggactggactgcccctggaagttctgcgatgaaaaggtgtctgtggatgaaagtgtgatgtcaacacacagcacagccagactgagttttgtgactccccgccaccacagggcagcggtgtgtctctgcaaagagggaaggtgcccacctgtccaccatggctgtgaagatgatccgtgccctgagggatccgaatgtgtgtctgatccctgggaggagaaacacacctgtgtctgtcccagcggcaggtttggtcagtgcccagggagttcatctatgacactgactggaaacagctacgtgaaataccgtctgacggaaaatgaaaacaaattagagatgaaactgaccatgaggctcagaacatattccacgcatgcggttgtcatgtatgctcgaggaactgactatagcatcttggagattcatcatggaaggctgcagtacaagtttgactgtggaagtggccctggaattgtctctgttcagagcattcaggtcaatgatgggcagtggcacgcagtggccctggaagtgaatggaaactatgctcgcttggttctagaccaagttcatactgcatcgggcacagccccagggactctgaaaaccctgaacctggataactatgtgttttttggtggccacatccgtcagcagggaacaaggcatggaagaagtcctcaagttggtaatggtttcaggggttgtatggactccatttatttgaatgggcaggagctccctttaaacagcaaacccagaagctatgcacacatcgaagagtcggtggatgtatctccaggctgcttcctgacggccacggaagactgcgccagcaacccttgccagaatggaggcgtttgcaatccgtcacctgctggaggttattactgcaaatgcagtgccttgtacatagggacccactgtgagataagcgtcaatccgtgttcctccaagccatgcctctatgggggcacgtgtgttgtcgacaacggaggctttgtttgccagtgtagaggattatatactggtcagaggtgtcagcttagtccatactgcaaagatgaaccctgtaagaatggcggaacatgctttgacagtttggatggcgccgtttgtcagtgtgattcgggttttaggggagaaaggtgtcagagtgatatcgacgagtgctctggaaacccttgcctgcacggggccctctgtgagaacacgcacggctcctatcactgcaactgcagccacgagtacaggggacgtcactgcgaggatgctgcgcccaaccagtatgtgtccacgccgtggaacattgggttggcggaaggaattggaatcgttgtgtttgttgcagggatatttttactggtggtggtgtttgttctctgccgtaagatgattagtcggaaaaagaagcatcaggctgaacctaaagacaagcacctgggacccgctacggctttcttgcaaagaccgtattttgattccaagctaaataagaacatttactcagacataccaccccaggtgcctgtccggcctatttcctacaccccgagtattccaagtgactcaagaaacaatctggaccgaaattccttcgaaggatctgctatcccagagcatcccgaattcagcacttttaaccccgagtctgtgcacgggcaccgaaaagcagtggcggtctgcagcgtggcgccaaacctgcctcccccacccccttcaaactccccttctgacagcgactccatccagaagcctagctgggactttgactatgacacaaaagtggtggatcttgatccctgtctttccaagaagcctctagaggaaaagccttcccagccatacagtgcccgggaaagcctgtctgaagtgcagtctctgagctccttccagtccgaatcgtgcgatgacaatgggtatcactgggatacatcagattggatgccaagcgttcctctgccggacatacaagagttccccaactatgaggtgattgatgagcagacacccctgtactcagcagatccaaacgccatcgatacggactattaccctggaggctacgacatcgaaagtgattttcctccacccccagaagacttccccgcagctgatgagctaccaccgttaccgcccgaattcagcaatcagtttgaatccatccaccctcctagagacatgcctgccgcgggtagcttgggttcttcatcaagaaaccggcagaggttcaacttgaatcagtatttgcccaatttttatcccctcgatatgtctgaacctcaaacaaaaggcactggtgagaatagtacttgtagagaaccccatgccccttacccgccagggtatcaaagacacttcgaggcgcccgctgtcgagagcatgcccatgtctgtgtacgcctccaccgcctcctgctctgacgtgtcagcctgctgcgaagtggagtccgaggtcatgatgagtgactatgagagcggggacgacggccacttcgaagaggtgacgatcccgcccctggattcccagcagcacacggaagtctga

SEQ ID NO: 72 - DNA, 2124 bp, Homo sapiens
atgaatcaggaactgctctctgtgggcagcaaaagacgacgaactggaggctctctgagaggtaacccttcctcaagccaggtagatgaagaacagatgaatcgtgtggtagaggaggaacagcaacagcaactcagacaacaagaggaggagcacactgcaaggaatggtgaagttgttggagtagaacctagacctggaggccaaaatgattcccagcaaggacagttggaagaaaacaataatagatttatttcggtagatgaggactcctcaggaaaccaagaagaacaagaggaagatgaagaacatgctggtgaacaagatgaggaggatgaggaggaggaggagatggaccaggagagtgacgattttgatcagtctgatgatagtagcagagaagatgaacatacacatactaacagtgtcacgaactccagtagtattgtggacctgcccgttcaccaactctcctccccattctatacaaaaacaacaaaaatgaaaagaaagttggaccatggttctgaggtccgctctttttctttgggaaagaaaccatgcaaagtctcagaatatacaagtaccactgggcttgtaccatgttcagcaacaccaacaacttttggggacctcagagcagccaatggccaagggcaacaacgacgccgaattacatctgtccagccacctacaggcctccaggaatggctaaaaatgtttcagagctggagtggaccagagaaattgcttgctttagatgaactcattgatagttgtgaaccaacacaagtaaaacatatgatgcaagtgatagaaccccagtttcaacgagacttcatttcattgctccctaaagagttggcactctatgtgctttcattcctggaacccaaagacctgctacaagcagctcagacatgtcgctactggagaattttggctgaagacaaccttctctggagagagaaatgcaaagaagaggggattgatgaaccattgcacatcaagagaagaaaagtaataaaaccaggtttcatacacagtccatggaaaagtgcatacatcagacagcacagaattgatactaactggaggcgaggagaactcaaatctcctaaggtgctgaaaggacatgatgatcatgtgatcacatgcttacagttttgtggtaaccgaatagttagtggttctgatgacaacactttaaaagtttggtcagcagtcacaggcaaatgtctgagaacattagtgggacatacaggtggagtatggtcatcacaaatgagagacaacatcatcattagtggatctacagatcggacactcaaagtgtggaatgcagagactggagaatgtatacacaccttatatgggcatacttccactgtgcgttgtatgcatcttcatgaaaaaagagttgttagcggttctcgagatgccactcttagggtttgggatattgagacaggccagtgtttacatgttttgatgggtcatgttgcagcagtccgctgtgttcaatatgatggcaggagggttgttagtggagcatatgattttatggtaaaggtgtgggatccagagactgaaacctgtctacacacgttgcaggggcatactaatagagtctattcattacagtttgatggtatccatgtggtgagtggatctcttgatacatcaatccgtgtttgggatgtggagacagggaattgcattcacacgttaacagggcaccagtcgttaacaagtggaatggaactcaaagacaatattcttgtctctgggaatgcagattctacagttaaaatctgggatatcaaaacaggacagtgtttacaaacattgcaaggtcccaacaagcatcagagtgctgtgacctgtttacagttcaacaagaactttgtaattaccagctcagatgatggaactgtaaaactatgggacttgaaaacgggtgaatttattcgaaacctagtcacattggagagtggggggagtgggggagttgtgtggcggatcagagcctcaaacacaaagctggtgtgtgcagttgggagtcggaatgggactgaagaaaccaagctgctggtgctggactttgatgtggacatgaagtga

SEQ ID NO: 73 - DNA, 2199 bp, Homo sapiens
atggtcagctggggtcgtttcatctgcctggtcgtggtcaccatggcaaccttgtccctggcccggccctccttcagtttagttgaggataccacattagagccagaagatgccatctcatccggagatgatgaggatgacaccgatggtgcggaagattttgtcagtgagaacagtaacaacaagagagcaccatactggaccaacacagaaaagatggaaaagcggctccatgctgtgcctgcggccaacactgtcaagtttcgctgcccagccggggggaacccaatgccaaccatgcggtggctgaaaaacgggaaggagtttaagcaggagcatcgcattggaggctacaaggtacgaaaccagcactggagcctcattatggaaagtgtggtcccatctgacaagggaaattatacctgtgtagtggagaatgaatacgggtccatcaatcacacgtaccacctggatgttgtggagcgatcgcctcaccggcccatcctccaagccggactgccggcaaatgcctccacagtggtcggaggagacgtagagtttgtctgcaaggtttacagtgatgcccagccccacatccagtggatcaagcacgtggaaaagaacggcagtaaatacgggcccgacgggctgccctacctcaaggttctcaaggccgccggtgttaacaccacggacaaagagattgaggttctctatattcggaatgtaacttttgaggacgctggggaatatacgtgcttggcgggtaattctattgggatatcctttcactctgcatggttgacagttctgccagcgcctggaagagaaaaggagattacagcttccccagactacctggagatagccatttactgcataggggtcttcttaatcgcctgtatggtggtaacagtcatcctgtgccgaatgaagaacacgaccaagaagccagacttcagcagccagccggctgtgcacaagctgaccaaacgtatccccctgcggagacaggtaacagtttcggctgagtccagctcctccatgaactccaacaccccgctggtgaggataacaacacgcctctcttcaacggcagacacccccatgctggcaggggtctccgagtatgaacttccagaggacccaaaatgggagtttccaagagataagctgacactgggcaagcccctgggagaaggttgctttgggcaagtggtcatggcggaagcagtgggaattgacaaagacaagcccaaggaggcggtcaccgtggccgtgaagatgttgaaagatgatgccacagagaaagacctttctgatctggtgtcagagatggagatgatgaagatgattgggaaacacaagaatatcataaatcttcttggagcctgcacacaggatgggcctctctatgtcatagttgagtatgcctctaaaggcaacctccgagaatacctccgagcccggaggccacccgggatggagtactcctatgacattaaccgtgttcctgaggagcagatgaccttcaaggacttggtgtcatgcacctaccagctggccagaggcatggagtacttggcttcccaaaaatgtattcatcgagatttagcagccagaaatgttttggtaacagaaaacaatgtgatgaaaatagcagactttggactcgccagagatatcaacaatatagactattacaaaaagaccaccaatgggcggcttccagtcaagtggatggctccagaagccctgtttgatagagtatacactcatcagagtgatgtctggtccttcggggtgttaatgtgggagatcttcactttagggggctcgccctacccagggattcccgtggaggaactttttaagctgctgaaggaaggacacagaatggataagccagccaactgcaccaacgaactgtacatgatgatgagggactgttggcatgcagtgccctcccagagaccaacgttcaagcagttggtagaagacttggatcgaattctcactctcacaaccaatgaggaatacttggacctcagccaacctctcgaacagtattcacctagttaccctgacacaagaagttcttgttcttcaggagatgattctgttttttctccagaccccatgccttacgaaccatgccttcctcagtatccacacataaacggcagtgttaaaacatga

SEQ ID NO: 74 - DNA, 2427 bp, Homo sapiens
atgggcgcccctgcctgcgccctcgcgctctgcgtggccgtggccatcgtggccggcgcctcctcggagtccttggggacggagcagcgcgtcgtggggcgagcggcagaagtcccgggcccagagcccggccagcaggagcagttggtcttcggcagcggggatgctgtggagctgagctgtcccccgcccgggggtggtcccatggggcccactgtctgggtcaaggatggcacagggctggtgccctcggagcgtgtcctggtggggccccagcggctgcaggtgctgaatgcctcccacgaggactccggggcctacagctgccggcagcggctcacgcagcgcgtactgtgccacttcagtgtgcgggtgacagacgctccatcctcgggagatgacgaagacggggaggacgaggctgaggacacaggtgtggacacaggggccccttactggacacggcccgagcggatggacaagaagctgctggccgtgccggccgccaacaccgtccgcttccgctgcccagccgctggcaaccccactccctccatctcctggctgaagaacggcagggagttccgcggcgagcaccgcattggaggcatcaagctgcggcatcagcagtggagcctggtcatggaaagcgtggtgccctcggaccgcggcaactacacctgcgtcgtggagaacaagtttggcagcatccggcagacgtacacgctggacgtgctggagcgctccccgcaccggcccatcctgcaggcggggctgccggccaaccagacggcggtgctgggcagcgacgtggagttccactgcaaggtgtacagtgacgcacagccccacatccagtggctcaagcacgtggaggtgaatggcagcaaggtgggcccggacggcacaccctacgttaccgtgctcaagtcctggatcagtgagagtgtggaggccgacgtgcgcctccgcctggccaatgtgtcggagcgggacgggggcgagtacctctgtcgagccaccaatttcataggcgtggccgagaaggccttttggctgagcgttcacgggccccgagcagccgaggaggagctggtggaggctgacgaggcgggcagtgtgtatgcaggcatcctcagctacggggtgggcttcttcctgttcatcctggtggtggcggctgtgacgctctgccgcctgcgcagcccccccaagaaaggcctgggctcccccaccgtgcacaagatctcccgcttcccgctcaagcgacaggtgtccctggagtccaacgcgtccatgagctccaacacaccactggtgcgcatcgcaaggctgtcctcaggggagggccccacgctggccaatgtctccgagctcgagctgcctgccgaccccaaatgggagctgtctcgggcccggctgaccctgggcaagccccttggggagggctgcttcggccaggtggtcatggcggaggccatcggcattgacaaggaccgggccgccaagcctgtcaccgtagccgtgaagatgctgaaagacgatgccactgacaaggacctgtcggacctggtgtctgagatggagatgatgaagatgatcgggaaacacaaaaacatcatcaacctgctgggcgcctgcacgcagggcgggcccctgtacgtgctggtggagtacgcggccaagggtaacctgcgggagtttctgcgggcgcggcggcccccgggcctggactactccttcgacacctgcaagccgcccgaggagcagctcaccttcaaggacctggtgtcctgtgcctaccaggtggcccggggcatggagtacttggcctcccagaagtgcatccacagggacctggctgcccgcaatgtgctggtgaccgaggacaacgtgatgaagatcgcagacttcgggctggcccgggacgtgcacaacctcgactactacaagaagacgaccaacggccggctgcccgtgaagtggatggcgcctgaggccttgtttgaccgagtctacactcaccagagtgacgtctggtcctttggggtcctgctctgggagatcttcacgctggggggctccccgtaccccggcatccctgtggaggagctcttcaagctgctgaaggagggccaccgcatggacaagcccgccaactgcacacacgacctgtacatgatcatgcgggagtgctggcatgccgcgccctcccagaggcccaccttcaagcagctggtggaggacctggaccgtgtccttaccgtgacgtccaccgacgagtacctggacctgtcggcgcctttcgagcagtactccccgggtggccaggacacccccagctccagctcctcaggggacgactccgtgtttgcccacgacctgctgcccccggccccacccagcagtgggggctcgcggacgtga

SEQ ID NO: 75 - DNA, 12186 bp, Homo sapiens
atgtctactctcctggaaaacatctttgccataattaatcttttcaagcaatattcaaaaaaagataaaaacactgacacattgagtaaaaaagagctgaaggaacttctggaaaaggaatttcggcaaatcctgaagaatccagatgacccagatatggttgatgtcttcatggatcacttggatatagaccacaacaagaaaattgacttcactgagtttcttctgatggtattcaagttggctcaagcatattatgagtctaccagaaaagagaatttaccgatatcaggacacaagcacagaaagcacagtcatcatgataaacatgaagataataaacaggaagaaaacaaagaaaacagaaaaagaccctcaagtctggaaagaagaaacaatagaaaagggaataagggaagatccaagagcccaagagaaacaggggggaaaaggcatgaatctagttctgaaaaaaaagaaagaaaaggatattcacctactcatagagaagaagaatatggaaaaaaccatcataactcaagtaaaaaagagaaaaacaagactgaaaatactagattaggagacaataggaagaggctaagtgaaagacttgaagagaaagaagacaatgaagaaggagtatatgattatgaaaatacaggaagaatgactcaaaaatggatacaatcaggccatattgccacatattacacaatccaggatgaagcctatgacaccactgatagtctattagaagaaaacaaaatatatgaaagatcaaggtcatctgatggcaaatcatcatctcaagtgaacaggtcaagacatgaaaatacaagccaggtaccattgcaggagtccaggacaagaaagcgtaggggatccagagttagccaggacagggacagtgagggacactcagaagactctgagaggcactctgggtcggcttccagaaaccatcatggatctgcgtgggagcagtcaagagatggctccagacaccccaggtcccatgatgaagacagagccagtcatgggcactctgcagacagctccagacaatcaggcactcgtcacgcagagacttcctctcgtggacagactgcatcatcccatgaacaggcaagatcaagtccaggagaaagacatggatccggccaccagcagtcagcagacagctccagacactcagccactgggcgcgggcaagcttcatctgcagtcagcgatcgtggacaccgggggtctagcggtagtcaggccagtgacagtgagggacattcagaaaactcagacacacaatcagtgtcaggccacggaaaggctgggctgagacagcagagccaccaagagtccacacgtggccggtcaggggaacggtctggacgttcagggtcttccctctaccaggtgagcactcatgaacagcctgactctgcccatggacggaccgggaccagcactggaggaagacaaggatcgcaccacgagcaggcacgagacagctccaggcattcagcgtcccaagagggtcaggacaccattcgtggacacccggggtcaagcagaggaggaaggcagggatcccaccacgagcaatcggtaaataggtctggacactcaggttcccatcacagccacaccacatcccagggaaggtctgatgcctcccatgggcagtcaggatccagaagtgcaagcagacaaacacgaaatgaggaacaatcaggagacggcaccaggcactcagggtcacgtcatcatgaagcttcctctcaggctgacagctctagacactcacaggtgggccagggacaatcatcggggcccaggacaagtaggaaccagggatccagtgttagccaggacagtgacagtcagggacactcagaagactctgagaggtggtctgggtctgcttccagaaaccatcatggatctgctcaggagcagtcaagagatggctccagacaccccaggtcccatcacgaagacagagctggtcatgggcactctgcagacagctccagaaaatcaggcactcgtcacacacagaattcctctagtggacaggctgcgtcatcccatgaacaggcaagatcaagtgcaggagaaagacatggatcccgccaccagctccagtcagcagacagctccagacactcaggcactgggcacggacaagcttcatctgcagtcagagacagtggacaccgagggtccagtggtagtcaggccactgacagtgagggacattcagaagactcagacacacagtcagtgtcaggccatggacaggctggtcaccatcagcagagccaccaagagtccgcacgtgaccggtcaggggaaaggtctcgacgttcagggtctttcctctaccaggtgagcactcataaacagtctgagtcctcccatggatggacagggcccagcactggagtaagacaaggatcccaccatgagcaggcacgagacaactccaggcactcagcatcccaagatggtcaggacaccattcgtggacacccggggtcaagcagaagaggaaggcaggggtcccaccacgagcaatcggtagataggtctggacactcagggtcccatcacagccacaccacatcccagggaaggtctgatgcctcccgtgggcagtcaggatccagaagtgcaagcagaacaacacgtaatgaggaacaatcaagagacggctccaggcactcagggtcacgtcaccatgaagcttcctctcatgccgacatctctagacactcacaggcaggccagggacaatcagaggggtccaggacaagcaggcgccagggatccagtgttagccaggacagtgacagtgagggacattcagaagactctgagaggtggtctgggtctgcttccagaaaccatcgtggatctgctcaggagcagtcaagacatggctccagacaccccaggtcccatcacgaagacagagccggtcacgggcactctgcagacagctccagacaatcaggaactcctcacgcagagacttcctctggtggacaggctgcgtcatcccatgaacaggcaagatcaagtccaggagaaagacacggatcccgccaccagcagtcagcagacagctccagacactcaggcattccgcgcagacaagcttcatctgcagtcagagacagtggacactgggggtccagtggtagtcaggccagtgatagtgagggacattcagaggagtcagacacacagtcagtgtcaggccatggacaggatgggccccatcagcagagccaccaagagtccgcacgtgactggtcagggggaaggtctggacgttcagggtctttcatctaccaggtgagcactcatgaacagtctgagtctgcccatgggcggaccaggaccagcactggacgaagacaaggatcccaccacgagcaggcacgagacagctccaggcactcagcgtcccaagagggtcaggacaccattcgtgcacacccggggtcaaggagaggaggaaggcagggatcccaccatgagcaatcggtagatagatctggacactcagggtcccatcacagccacaccacatcccagggaaggtctgatgcctcccatgggcagtcaggatccagaagtgcaagcagacaaactcgtaaggacaaacaatcaggagacggctccaggcactcagggtcacgtcaccatgaagctgcctcttgggctgacagctctagacactcacaggtgggacaggaacaatcatcggggtccaggacaagcaggcaccagggatccagtgttagccaggacagtgacagtgagagacactcagacgactccgagaggttgtctgggtctgcttccagaaaccatcatggatcttctcgggagcagtcaagagatggctccagacaccctgggttccatcaagaagacagagccagtcacgggcactctgcagacagctccagacaatcaggcactcatcacacagagtcttcctctcatggacaggctgtgtcatcccatgaacaggcaagatcaagtccaggagaaagacatggatcccgccaccagcagtcagcagacagctccagacactcaggcattgggcacagacaagcttcatctgcagtcagagacagtggacaccgagggtccagtggtagtcaggtcactaacagtgagggacattcagaagactcagacacacagtcagtgtcagcccacggacaagctgggccccatcagcagagccacaaagagtccgcacgtggccagtcaggggaaagctctggacgttcaaggtctttcctctaccaggtgagctctcatgaacagtctgagtccacacacggacagactgcacccagcactggaggaagacaaggatcccgccatgagcaggcacgaaacagctctaggcactcagcatcccaagacggtcaggacaccattcgtggacacccggggtcaagcagaggaggaaggcagggatcctaccacgagcaatcagtagataggtctggacactcagggtaccatcacagccacaccacaccccagggaaggtctgatgcctcccatgggcagtcaggacccagaagtgcaagcaggcaaacaagaaatgaggaacaatcaggagacggctccaggcactcagggtcacgtcaccatgaaccttccactcgggccggcagctctagacactcacaggtgggccagggagaatcagcggggtccaagacaagcaggcgccagggatccagtgttagtcaggacagggacagtgagggacactcagaagactctgagaggcggtctgagtcggcttccagaaaccattatggatctgctcgggagcagtcaagacatggctccaggaaccccaggtcccatcaagaagatagagccagtcatgggcactctgcagagagctccagacaatcaggcactcgtcatgcagagacttcctctggtggacaggctgcatcatcccaggaacaggcaaggtcaagtccaggagaaagacatggatcccgccaccagcagtcagcagacagctccacagactcaggcactgggcgcagacaagattcatctgtagtcggagacagtggaaaccgagggtccagtggtagccaggccagtgacagcgagggacactcagaagagtcagacacacagtcagtgtcagcccacggacaggctgggccccatcagcagagccaccaagagtccacacgtggccagtcaggggaaaggtctggacgttcagggtctttcctctaccaggtgagcactcatgaacagtctgagtccgcccatggacgcacagggcccagcactggaggaagacaaagatcccgccacgagcaggcacgagacagctccaggcactcagcgtcccaagagggtcaggacaccattcgtggacacccagggtcaagcagaggaggaaggcagggatcccactatgagcaatcggtagatagttctggacactcagggtctcatcacagccacaccacgtcccaggaaaggtctgatgtctcccgtgggcagtcaggatccagaagtgtcagcagacaaacacgtaatgagaaacaatcaggagacggctccaggcactcagggtcgcgtcaccatgaagcttcctctcgggccgacagctctagacactcgcaggtgggccagggacaatcatcagggcccaggacaagcaggaaccagggatccagtgttagccaggacagtgacagtcagggacactcagaagactctgagaggtggtctgggtctgcttccagaaaccatcttggatctgcttgggagcagtcaagagatggctccagacaccctgggtcccatcacgaagacagagccggtcacgggcactctgcagacagctccagacaatcaggcactcgtcacacagagtcttcctctcgtggacaggctgcgtcatcccatgaacaggcaagatcaagtgcaggagaaagacatggatcccaccaccagctccagtcagcagacagctccagacactcaggcattgggcatggacaagcttcatctgcagtcagagacagtggacaccgagggtacagtggtagtcaggccagtgacagtgagggacattcagaagactcagacacacagtcagtgtcagcacagggaaaagctgggccccatcagcagagccacaaagagtccgcacgtggccagtcaggggaaagctctggacgttcagggtctttcctctaccaggtgagcactcatgaacagtctgagtccacccatggacagtctgcgcccagcactggaggaagacaaggatcccattatgatcaggcacaagacagctccaggcactcagcatcccaagagggtcaggacaccattcgtggacacccggggccaagcagaggaggaagacaggggtcccaccaagagcaatcggtagataggtctggacactcagggtctcatcacagccacaccacatcccagggaaggtctgatgcctcccgtgggcagtcaggatccagaagtgcaagcagaaaaacatatgacaaggaacaatcaggagatggctctaggcactcagggtcgcatcatcatgaagcttcctcttgggccgacagctctagacactcactggtgggccagggacaatcatcagggcccaggacaagcaggccccggggatccagtgttagccaggacagtgacagtgagggacactcagaagattctgagaggcggtctgggtctgcgtccagaaaccatcatggatctgctcaggagcagtcaagagatggctccagacaccccaggtcccatcacgaagacagagccggtcatgggcactctgcagagagctccagacaatcaggcactcatcatgcagagaattcctctggtggacaggctgcatcatcccatgaacaggcaagatcaagtgcaggagagagacacggatcccaccaccagcagtcagcagacagctccagacactcaggcattgggcacggacaagcttcatctgcagtcagagacagtggacaccgagggtccagtggtagtcaggccagtgacagtgagggacattcagaagactcagacacacagtcagtgtcagcccacggacaggctgggccccatcagcagagccaccaagagtccacacgtggccggtcagcaggaaggtctggacgttcagggtctttcctctaccaggtgagcactcatgaacagtctgagtccgcccatggacggaccgggaccagcactggaggaagacaaggatcccaccacaagcaggcacgagacagctccaggcactcaacgtcccaagagggtcaggacaccattcatggacacccggggtcaagcagtggaggaaggcagggatcccactacgagcaattggtagatagatctggacactcagggtctcatcacagccacaccacatcccagggaaggtctgatgcctcccatgggcactcaggatccagaagtgcaagcagacaaactcgtaacgatgaacaatcaggagacggctccaggcactcagggtcgcgtcaccatgaagcttcctctcgggccgacagctctggacactcgcaggtgggccagggacaatcagaggggcccaggacaagcaggaactggggatccagttttagccaggacagtgacagtcagggacactcagaagactctgagaggtggtctgggtctgcttccagaaaccatcatggatctgctcaggagcagctaagagatggctccagacaccccaggtcccatcaagaagacagagctggtcatgggcactctgcagacagctccagacaatcaggcactcgtcacacacagacttcctctggtggacaggctgcatcatcccatgaacaggcaagatcaagtgcaggagaaagacatggatcccaccaccagcagtcagcagacagctccagacactcaggcattgggcacggacaagcttcatctgcagtcagagacagtggacaccgagggtacagtggtagtcaggccagtgacaatgagggacattcagaagactcagacacacagtcagtgtcagcccacggacaggctgggtcccatcagcagagccaccaagagtccgcacgtggccggtcaggggaaacgtctggacattcaggatctttcctctaccaggtgagcactcatgaacagtctgagtcctcccatggatggacggggcccagcactagaggaagacaaggatcccgccatgagcaggcacaagacagctccaggcactcagcatcccaagacggtcaggacaccattcgtggacacccggggtcaagcagaggaggaaggcaggggtaccaccacgagcattcggtagatagctctggacactcagggtcccatcacagccacaccacatcccagggaaggtctgatgcctcccgtgggcagtcaggatccagaagtgcaagcagaacaacacgtaatgaggaacaatcaggagacggctccaggcactcagggtcgcgtcaccatgaagcttccactcatgccgacatctctagacactcacaggcagtccagggacaatcagaggggtccaggagaagcaggcgccagggatccagtgtgagccaggacagtgacagtgagggacattcagaagactctgagaggtggtctgggtctgcttccagaaaccatcatggatctgctcaggagcagctaagagatggctccagacaccccaggtcccatcaagaagacagagctggtcatgggcactctgcagacagctccagacaatcaggcactcgtcacacacagacttcctctggtggacaggctgcatcatcccatgaacaggcaagatcaagtgcaggagaaagacatggatcccaccaccagcagtcagcagacagctccagacactcaggcattgggcacggacaagcttcatctgcagtcagagacagtggacaccgagggtacagtggtagtcaggccagtgacaatgagggacattcagaagactcagacacacagtcagtgtcagcccacggacaggctgggtcccatcagcagagccaccaagagtccgcacgtggccggtcaggggaaacgtctggacattcaggatctttcctctaccaggtgagcactcatgaacagtctgagtcctcccatggatggacggggcccagcactagaggaagacaaggatcccgccatgagcaggcacaagacagctccaggcactcagcatcccaatacggtcaggacaccattcgtggacacccggggtcaagcagaggaggaaggcaggggtaccaccacgagcattcggtagatagctctggacactcagggtcccatcacagccacaccacatcccagggaaggtctgatgcctcccgtgggcagtcaggatccagaagtgcaagcagaacaacacgtaatgaggaacaatcaggagacagctccaggcactcagtgtcacgtcaccatgaagcttccactcatgccgacatctctagacactcacaggcagtccagggacaatcagaggggtccaggagaagcaggcgccagggatccagtgtgagccaggacagtgacagtgagggacattcagaagactctgagaggtggtctgggtctgcttccagaaaccatcgtggatctgttcaggagcagtcaaggcacggctccagacaccccaggtcccatcacgaagacagagccggtcacgggcactctgcagaccgctccagacaatcaggcactcgtcacgcagagacttcctctggtggacaggctgcatcatcccatgaacaggcaagatcaagtccaggagagagacacggatcccgccaccagcagtcagcagacagctccagacactcaggcattccgcgtggacaagcttcatctgcagtcagagacagtagacactgggggtccagtggtagtcaggccagtgatagtgagggacattcagaagagtcagacacacagtcagtgtcaggccatggacaggctgggccccatcagcagagccaccaagagtccgcacgtgaccggtcagggggaaggtctggacgttcagggtctttcctctaccaggtgagcactcatgaacagtctgagtctgcccatgggcggaccaggaccagcactggacgaagacaaggatcccaccacgagcaggcacgagacagctccaggcactcagcgtcccaagagggtcaggacaccattcgtggacacccggggtcaagcagaagaggaaggcagggatcccactacgagcaatcggtagataggtctggacactcagggtcccatcacagccacaccacatcccagggaaggtctgatgcctcccgtgggcagtcaggatccagaagtgccagcagacaaactcgtaatgacgaacaatcaggagatggctccaggcactcatggtcgcatcaccatgaagcttccactcaggcggacagctctagacactcacagtccggccagggacaatcagcggggcccaggacaagcaggaaccagggatccagtgttagccaggacagtgacagtcagggacactcagaagactctgagaggtggtctgggtctgcttccagaaaccatcgtggatctgctcaggagcagtcaagagatggctccagacaccccacgtcccatcacgaagacagagccggtcacgggcactctgcagagagctccagacaatcaggcactcatcatgcagagaattcctctggtggacaggctgcatcatcccatgaacaggcaagatcaagtgcaggagagagacatggatcccaccaccagcagtcagcagacagctccagacactcaggcattgggcacggacaagcttcatctgcagtcagagacagtggacaccgagggtccagtggtagtcaggccagtgacagtgagggacattcagaagactcagacacacagtcagtgtcagcccacggacaggctgggccccatcagcagagccaccaagagtccacacgtggccggtcagcaggaaggtctggacgttcagggtctttcctctaccaggtgagcactcatgaacagtctgagtctgcccatggacgggctgggcccagtactggaggaagacaaggatcccgccacgagcaggcacgagacagctccaggcactcagcgtcccaagagggtcaggacaccattcgtggacacccggggtcaaggagaggaggaagacagggatcctaccacgagcaatcggtagataggtctggacactcagggtcccatcacagccacaccacatcccagggaaggtctgatgcctcccatgggcagtcaggatccagaagtgcaagcagagaaacacgtaatgaggaacagtcaggagacggctccaggcactcagggtcgcgtcaccatgaagcttccactcaggctgacagctctagacactcacagtccggccagggtgaatcagcggggtccaggagaagcaggcgccagggatccagtgttagccaggacagtgacagtgaggcatacccagaggactctgagaggcgatctgagtctgcttccagaaaccatcatggatcttctcgggagcagtcaagagatggctccagacaccccggatcctctcaccgcgatacagccagtcatgtacagtcttcacctgtacagtcagactctagtaccgctaaggaacatggtcactttagtagtctttcacaagattctgcgtatcactcaggaatacagtcacgtggcagtcctcacagttctagttcttatcattatcaatctgagggcactgaaaggcaaaaaggtcaatcaggtttagtttggagacatggcagctatggtagtgcagattatgattatggtgaatccgggtttagacactctcagcacggaagtgttagttacaattccaatcctgttgttttcaaggaaagatctgatatctgtaaagcaagtgcgtttggtaaagatcatccaaggtattatgcaacgtatattaataaggacccaggtttatgtggccattctagtgatatatcgaaacaactgggatttagtcagtcacagagatactattactatgagtaa

SEQ ID NO: 76 - DNA, 2982 bp, Homo sapiens
atgccggcgttggcgcgcgacggcggccagctgccgctgctcgttgttttttctgcaatgatatttgggactattacaaatcaagatctgcctgtgatcaagtgtgttttaatcaatcataagaacaatgattcatcagtggggaagtcatcatcatatcccatggtatcagaatccccggaagacctcgggtgtgcgttgagaccccagagctcagggacagtgtacgaagctgccgctgtggaagtggatgtatctgcttccatcacactgcaagtgctggtcgacgccccagggaacatttcctgtctctgggtctttaagcacagctccctgaattgccagccacattttgatttacaaaacagaggagttgtttccatggtcattttgaaaatgacagaaacccaagctggagaatacctactttttattcagagtgaagctaccaattacacaatattgtttacagtgagtataagaaataccctgctttacacattaagaagaccttactttagaaaaatggaaaaccaggacgccctggtctgcatatctgagagcgttccagagccgatcgtggaatgggtgctttgcgattcacagggggaaagctgtaaagaagaaagtccagctgttgttaaaaaggaggaaaaagtgcttcatgaattatttgggacggacataaggtgctgtgccagaaatgaactgggcagggaatgcaccaggctgttcacaatagatctaaatcaaactcctcagaccacattgccacaattatttcttaaagtaggggaacccttatggataaggtgcaaagctgttcatgtgaaccatggattcgggctcacctgggaattagaaaacaaagcactcgaggagggcaactactttgagatgagtacctattcaacaaacagaactatgatacggattctgtttgcttttgtatcatcagtggcaagaaacgacaccggatactacacttgttcctcttcaaagcatcccagtcaatcagctttggttaccatcgtagaaaagggatttataaatgctaccaattcaagtgaagattatgaaattgaccaatatgaagagttttgtttttctgtcaggtttaaagcctacccacaaatcagatgtacgtggaccttctctcgaaaatcatttccttgtgagcaaaagggtcttgataacggatacagcatatccaagttttgcaatcataagcaccagccaggagaatatatattccatgcagaaaatgatgatgcccaatttaccaaaatgttcacgctgaatataagaaggaaacctcaagtgctcgcagaagcatcggcaagtcaggcgtcctgtttctcggatggatacccattaccatcttggacctggaagaagtgttcagacaagtctcccaactgcacagaagagatcacagaaggagtctggaatagaaaggctaacagaaaagtgtttggacagtgggtgtcgagcagtactctaaacatgagtgaagccataaaagggttcctggtcaagtgctgtgcatacaattcccttggcacatcttgtgagacgatccttttaaactctccaggccccttccctttcatccaagacaacatctcattctatgcaacaattggtgtttgtctcctcttcattgtcgttttaaccctgctaatttgtcacaagtacaaaaagcaatttaggtatgaaagccagctacagatggtacaggtgaccggctcctcagataatgagtacttctacgttgatttcagagaatatgaatatgatctcaaatgggagtttccaagagaaaatttagagtttgggaaggtactaggatcaggtgcttttggaaaagtgatgaacgcaacagcttatggaattagcaaaacaggagtctcaatccaggttgccgtcaaaatgctgaaagaaaaagcagacagctctgaaagagaggcactcatgtcagaactcaagatgatgacccagctgggaagccacgagaatattgtgaacctgctgggggcgtgcacactgtcaggaccaatttacttgatttttgaatactgttgctatggtgatcttctcaactatctaagaagtaaaagagaaaaatttcacaggacttggacagagattttcaaggaacacaatttcagtttttaccccactttccaatcacatccaaattccagcatgcctggttcaagagaagttcagatacacccggactcggatcaaatctcagggcttcatgggaattcatttcactctgaagatgaaattgaatatgaaaaccaaaaaaggctggaagaagaggaggacttgaatgtgcttacatttgaagatcttctttgctttgcatatcaagttgccaaaggaatggaatttctggaatttaagtcgtgtgttcacagagacctggccgccaggaacgtgcttgtcacccacgggaaagtggtgaagatatgtgactttggattggctcgagatatcatgagtgattccaactatgttgtcaggggcaatgcccgtctgcctgtaaaatggatggcccccgaaagcctgtttgaaggcatctacaccattaagagtgatgtctggtcatatggaatattactgtgggaaatcttctcacttggtgtgaatccttaccctggcattccggttgatgctaacttctacaaactgattcaaaatggatttaaaatggatcagccattttatgctacagaagaaatatacattataatgcaatcctgctgggcttttgactcaaggaaacggccatccttccctaatttgacttcgtttttaggatgtcagctggcagatgcagaagaagcgatgtatcagaatgtggatggccgtgtttcggaatgtcctcacacctaccaaaacaggcgacctttcagcagagagatggatttggggctactctctccgcaggctcaggtcgaagattcgtag

SEQ ID NO: 77 - DNA, 1419 bp, Homo sapiens
atgttaggaactgtgaagatggaagggcatgaaaccagcgactggaacagctactacgcagacacgcaggaggcctactcctccgtcccggtcagcaacatgaactcaggcctgggctccatgaactccatgaacacctacatgaccatgaacaccatgactacgagcggcaacatgaccccggcgtccttcaacatgtcctatgccaacccgggcctaggggccggcctgagtcccggcgcagtagccggcatgccggggggctcggcgggcgccatgaacagcatgactgcggccggcgtgacggccatgggtacggcgctgagcccgagcggcatgggcgccatgggtgcgcagcaggcggcctccatgaatggcctgggcccctacgcggccgccatgaacccgtgcatgagccccatggcgtacgcgccgtccaacctgggccgcagccgcgcgggcggcggcggcgacgccaagacgttcaagcgcagctacccgcacgccaagccgccctactcgtacatctcgctcatcaccatggccatccagcaggcgcccagcaagatgctcacgctgagcgagatctaccagtggatcatggacctcttcccctattaccggcagaaccagcagcgctggcagaactccatccgccactcgctgtccttcaatgactgcttcgtcaaggtggcacgctccccggacaagccgggcaagggctcctactggacgctgcacccggactccggcaacatgttcgagaacggctgctacttgcgccgccagaagcgcttcaagtgcgagaagcagccgggggccggcggcgggggcgggagcggaagcgggggcagcggcgccaagggcggccctgagagccgcaaggacccctctggcgcctctaaccccagcgccgactcgcccctccatcggggtgtgcacgggaagaccggccagctagagggcgcgccggcccccgggcccgccgccagcccccagactctggaccacagtggggcgacggcgacagggggcgcctcggagttgaagactccagcctcctcaactgcgccccccataagctccgggcccggggcgctggcctctgtgcccgcctctcacccggcacacggcttggcaccccacgagtcccagctgcacctgaaaggggacccccactactccttcaaccacccgttctccatcaacaacctcatgtcctcctcggagcagcagcataagctggacttcaaggcatacgaacaggcactgcaatactcgccttacggctctacgttgcccgccagcctgcctctaggcagcgcctcggtgaccaccaggagccccatcgagccctcagccctggagccggcgtactaccaaggtgtgtattccagacccgtcctaaacacttcctag

SEQ ID NO: 78 - DNA, 1212 bp, Homo sapiens
atgaagttggaggtgttcgtccctcgcgcggcccacggggacaagcagggcagtgacctggagggcgcgggcggcagcgacgcgccgtccccgctgtcggcggcgggagacgactccctgggctcagatggggactgcgcggccaacagcccggccgcgggcggcggcgccagagatacgcagggcgacggcgaacagagtgcgggaggcgggccgggcgcggaggaggcgatcccggcagcagctgctgcagcggtggtggcggagggcgcggaggccggggcggcggggccaggcgcgggcggcgcggggagcggcgagggtgcacgcagcaagccatatacgcggcggcccaagcccccctactcgtacatcgcgctcatcgccatggccatccgcgactcggcgggcgggcgcttgacgctggcggagatcaacgagtacctcatgggcaagttcccctttttccgcggcagctacacgggctggcgcaactccgtgcgccacaacctttcgctcaacgactgcttcgtcaaggtgctgcgcgacccctcgcggccctggggcaaggacaactactggatgctcaaccccaacagcgagtacaccttcgccgacggggtcttccgccgccgccgcaagcgcctcagccaccgcgcgccggtccccgcgcccgggctgcggcccgaggaggccccgggcctccccgccgccccgccgcccgcgcccgccgccccggcctcgccccgcatgcgctcgcccgcccgccaggaggagcgcgccagccccgcgggcaagttctccagctccttcgccatcgacagcatcctgcgcaagcccttccgcagccgccgcctcagggacacggcccccgggacgacgcttcagtggggcgccgcgccctgcccgccgctgcccgcgttccccgcgctcctccccgcggcgccctgcagggccctgctgccgctctgcgcgtacggcgcgggcgagccggcgcggctgggcgcgcgcgaggccgaggtgccaccgaccgcgccgcccctcctgcttgcacctctcccggcggcggcccccgccaagccactccgaggcccggcggccggcggcgcgcacctgtactgccccctgcggctgcccgcagccctgcaggcggcctcagtccgccgccctggcccgcacctgccgtacccggtggagacgctcctagcctga

SEQ ID NO: 79 - DNA, 2145 bp, Homo sapiens
atgctacatttaaaagtgcagtttttggatgattcccagaagatttttgtggttgatcaaaagtcatccgggaaggcattgtttaacctgagttgcagccatctaaatcttgctgaaaaggaatattttggattagaattctgcagccattctggaaataatgtttggctggagcttttgaagcccataacaaagcaggtaaaaaatcctaaggagattgttttcaaatttatggtgaaatttttcccagtggaccctggacatctgcgggaagaacttacaaggtatctttttactcttcaaataaagaaggatttggctctaggaaggcttccatgcagtgacaactgtacagcgttgatggtatctcacatcttacaatcagaacttggagactttcatgaagaaacagataggaagcatctggcacaaactcggtacttaccaaaccaagactgtttagagggcaagatcatgcactttcatcagaagcacattggcaggagcccagctgaatctgacattctgctactggacatagcaaggaagctggatatgtatggcatcaggcctcaccccgccagtgatggtgaagggatgcagattcacctggctgttgctcacatgggagtactggtgttacggggaaatacaaagatcaatacttttaactgggctaaaatccgcaagttgagttttaagagaaagcattttctcatcaaacttcatgccaatatcttggtgttgtgcaaggataccttggagttcaccatggccagccgagatgcctgcaaggctttctggaagacttgtgtggaataccatgctttcttcaggctttcggaagagcccaaatcaaagcccaaaaccctactctgcagcaagggttccagtttccgctatagtggacgaacccaaaggcaacttttggaatatgggagaaaagggaggctgaagagcttgccatttgaaaggaaacattacccatctcagtaccatgaacgacagtgcaggtcctcaccagacctcctctctgatgtgtcaaaacaagtggaagatttgagactagcatatggtggtggctactaccaaaatgtgaatggagtgcacgcatctgagccagtgctggagagtaggaggaggaattctgcattggaggtgacatttgcaactgagctggagcattccaaaccagaggcggatcccacattgctacatcagtcccaaagcagttcctctttcccttttatttatatggaccctgtctttaacactgagcccaatcctaaccctgatcccagagacattttttcagagaggagttctctaagctccttccaaacaagctgtaagttttctggtaatcacatgagcatatattctggcctcacaagcaaagtgcgtccagcaaagcagctaacttacacggatgtgccctatattccttgtacaggtcagcaggttggtattatgcctccccaggtctttttttatgtggacaagccaccccaggtgcccagatggtccccaattagagcagaggaaaggacaagtccacatagctatgtagagcccactgcaatgaagccagctgaaagaagcccaaggaatatcagaatgaagagctttcagcaagacctgcaagtactccaagaagctatagccaggactagcggtaggagcaacatcaatgtaggtctagaagaggaagacccaaatttggaagatgcatttgtatgtaacattcaagagcaaacccctaaaaggtcccagagccaatcagacatgaaaactattcgttttccttttgggtcagaatttagacctttagggccttgtcctgctctcagtcataaagcagacctgtttacggatatgtttgcagagcaggagttgccagcagttctaatggatcaaagtacagcagaaaggtatgtagctagtgaatccagtgattctgaatcagagattcttaaaccagactactatgctttgtatggcaaagaaataaggtcacccatggccagaatccgcctgtcttctggtagtctacagttagatgaagaagatgaagatgcttatttcaacacaccaactgctgaagacaggacttcactaaaaccatgtaattactttttagcttaa

SEQ ID NO: 80 - DNA, 1335 bp, Homo sapiens
atggaggtgacggcggaccagccgcgctgggtgagccaccaccaccccgccgtgctcaacgggcagcacccggacacgcaccacccgggcctcagccactcctacatggacgcggcgcagtacccgctgccggaggaggtggatgtgctttttaacatcgacggtcaaggcaaccacgtcccgccctactacggaaactcggtcagggccacggtgcagaggtaccctccgacccaccacgggagccaggtgtgccgcccgcctctgcttcatggatccctaccctggctggacggcggcaaagccctgggcagccaccacaccgcctccccctggaatctcagccccttctccaagacgtccatccaccacggctccccggggcccctctccgtctaccccccggcctcgtcctcctccttgtcggggggccacgccagcccgcacctcttcaccttcccgcccaccccgccgaaggacgtctccccggacccatcgctgtccaccccaggctcggccggctcggcccggcaggacgagaaagagtgcctcaagtaccaggtgcccctgcccgacagcatgaagctggagtcgtcccactcccgtggcagcatgaccgccctgggtggagcctcctcgtcgacccaccaccccatcaccacctacccgccctacgtgcccgagtacagctccggactcttcccccccagcagcctgctgggcggctcccccaccggcttcggatgcaagtccaggcccaaggcccggtccagcacagaaggcagggagtgtgtgaactgtggggcaacctcgaccccactgtggcggcgagatggcacgggacactacctgtgcaacgcctgcgggctctatcacaaaatgaacggacagaaccggcccctcattaagcccaagcgaaggctgtctgcagccaggagagcagggacgtcctgtgcgaactgtcagaccaccacaaccacactctggaggaggaatgccaatggggaccctgtctgcaatgcctgtgggctctactacaagcttcacaatattaacagacccctgactatgaagaaggaaggcatccagaccagaaaccgaaaaatgtctagcaaatccaaaaagtgcaaaaaagtgcatgactcactggaggacttccccaagaacagctcgtttaacccggccgccctctccagacacatgtcctccctgagccacatctcgcccttcagccactccagccacatgctgaccacgcccacgccgatgcacccgccatccagcctgtcctttggaccacaccacccctccagcatggtcaccgccatgggttag

SEQ ID NO: 81 - DNA, 1134 bp, Homo sapiens
atggcggacttcctgccgtcgcggtccgtgctgtccgtgtgcttccccggctgcctgctgacgagtggcgaggccgagcagcaacgcaagtccaaggagatcgacaaatgcctgtctcgggaaaagacctatgtgaagcggctggtgaagatcctgctgctgggcgcgggcgagagcggcaagtccaccttcctgaagcagatgcggatcatccacgggcaggacttcgaccagcgcgcgcgcgaggagttccgccccaccatctacagcaacgtgatcaaaggtatgagggtgctggttgatgctcgagagaagcttcatattccctggggagacaactcaaaccaacaacatggagataagatgatgtcgtttgatacccgggcccccatggcagcccaaggaatggtggaaacaagggttttcttacaatatcttcctgctataagagcattatgggcagacagcggcatacagaatgcctatgaccggcgtcgagaatttcaactgggtgaatctgtaaaatatttcctggataacttggataaacttggagaaccagattatattccatcacaacaagatattctgcttgccagaagacccaccaaaggcatccatgaatacgactttgaaataaaaaatgttcctttcaaaatggttgatgtaggtggtcagagatcagaaaggaaacgttggtttgaatgtttcgacagtgtgacatcaatacttttccttgtttcctcaagtgaatttgaccaggtgcttatggaagatcgactgaccaatcgccttacagagtctctgaacatttttgaaacaatcgtcaataaccgggttttcagcaatgtctccataattctgttcttaaacaagacagacttgcttgaggagaaggtgcaaattgtgagcatcaaagactatttcctagaatttgaaggggatccccactgcttaagagacgtccaaaaattcctggtggaatgtttccggaacaaacgccgggaccagcaacagaagcccttataccaccacttcaccactgctatcaacacggagaacatccgccttgttttccgtgacgtgaaggatactattctgcatgacaacctcaagcagcttatgctacagtga

SEQ ID NO: 82 - DNA, 3771 bp, Homo sapiens
atgctgttcaagctcctgcagagacagacctatacctgcctgtcccacaggtatgggctctacgtgtgcttcttgggcgtcgttgtcaccatcgtctccgccttccagttcggagaggtggttctggaatggagccgagatcaataccatgttttgtttgattcctatagagacaatattgctggaaagtcctttcagaatcggctttgtctgcccatgccgattgacgttgtttacacctgggtgaatggcacagatcttgaactactgaaggaactacagcaggtcagagaacagatggaggaggagcagaaagcaatgagagaaatccttgggaaaaacacaacggaacctactaagaagagtgagaagcagttagagtgtttgctaacacactgcattaaggtgccaatgcttgtcctggacccagccctgccagccaacatcaccctgaaggacctgccatctctttatccttcttttcattctgccagtgacattttcaatgttgcaaaaccaaaaaacccttctaccaatgtctcagttgttgtttttgacagtactaaggatgttgaagatgcccactctggactgcttaaaggaaatagcagacagacagtatggaggggctacttgacaacagataaagaagtccctggattagtgctaatgcaagatttggctttcctgagtggatttccaccaacattcaaggaaacaaatcaactaaaaacaaaattgccagaaaatctttcctctaaagtcaaactgttgcagttgtattcagaggccagtgtagcgcttctaaaactgaataaccccaaggattttcaagaattgaataagcaaactaagaagaacatgaccattgatggaaaagaactgaccataagtcctgcatatttattatgggatctgagcgccatcagccagtctaagcaggatgaagacatctctgccagtcgttttgaagataacgaagaactgaggtactcattgcgatctatcgagaggcatgcaccatgggttcggaatattttcattgtcaccaacgggcagattccatcctggctgaaccttgacaatcctcgagtgacaatagtaacacaccaggatgtttttcgaaatttgagccacttgcctacctttagttcacctgctattgaaagtcacattcatcgcatcgaagggctgtcccagaagtttatttacctaaatgatgatgtcatgtttgggaaggatgtctggccagatgatttttacagtcactccaaaggccagaaggtttatttgacatggcctgtgccaaactgtgccgagggctgcccaggttcctggattaaggatggctattgtgacaaggcttgtaataattcagcctgcgattgggatggtggggattgctctggaaacagtggagggagtcgctatattgcaggaggtggaggtactgggagtattggagttggacagccctggcagtttggtggaggaataaacagtgtctcttactgtaatcagggatgtgcgaattcctggctcgctgataagttctgtgaccaagcatgcaatgtcttgtcctgtgggtttgatgctggcgactgtgggcaagatcattttcatgaattgtataaagtgatccttctcccaaaccagactcactatattattccaaaaggtgaatgcctgccttatttcagctttgcagaagtagccaaaagaggagttgaaggtgcctatagtgacaatccaataattcgacatgcttctattgccaacaagtggaaaaccatccacctcataatgcacagtggaatgaatgccaccacaatacattttaatctcacgtttcaaaatacaaacgatgaagagttcaaaatgcagataacagtggaggtggacacaagggagggaccaaaactgaattctacagcccagaagggttacgaaaatttagttagtcccataacacttcttccagaggcggaaatcctttttgaggatattcccaaagaaaaacgcttcccgaagtttaagagacatgatgttaactcaacaaggagagcccaggaagaggtgaaaattcccctggtaaatatttcactccttccaaaagacgcccagttgagtctcaataccttggatttgcaactggaacatggagacatcactttgaaaggatacaatttgtccaagtcagccttgctgagatcatttctgatgaactcacagcatgctaaaataaaaaatcaagctataataacagatgaaacaaatgacagtttggtggctccacaggaaaaacaggttcataaaagcatcttgccaaacagcttaggagtgtctgaaagattgcagaggttgacttttcctgcagtgagtgtaaaagtgaatggtcatgaccagggtcagaatccacccctggacttggagaccacagcaagatttagagtggaaactcacacccaaaaaaccataggcggaaatgtgacaaaagaaaagcccccatctctgattgttccactggaaagccagatgacaaaagaaaagaaaatcacagggaaagaaaaagagaacagtagaatggaggaaaatgctgaaaatcacataggcgttactgaagtgttacttggaagaaagctgcagcattacacagatagttacttgggctttttgccatgggagaaaaaaaagtatttccaagatcttctcgacgaagaagagtcattgaagacacaattggcatacttcactgatagcaaaaatactgggaggcaactaaaagatacatttgcagattccctcagatatgtaaataaaattctaaatagcaagtttggattcacatcgcggaaagtccctgctcacatgcctcacatgattgaccggattgttatgcaagaactgcaagatatgttccctgaagaatttgacaagacgtcatttcacaaagtgcgccattctgaggatatgcagtttgccttctcttatttttattatctcatgagtgcagtgcagccactgaatatatctcaagtctttgatgaagttgatacagatcaatctggtgtcttgtctgacagagaaatccgaacactggctaccagaattcacgaactgccgttaagtttgcaggatttgacaggtctggaacacatgctaataaattgctcaaaaatgcttcctgctgatatcacgcagctaaataatattccaccaactcaggaatcctactatgatcccaacctgccaccggtcactaaaagtctagtaacaaactgtaaaccagtaactgacaaaatccacaaagcatataaggacaaaaacaaatataggtttgaaatcatgggagaagaagaaatcgcttttaaaatgattcgtaccaacgtttctcatgtggttggccagttggatgacataagaaaaaaccctaggaagtttgtttgcctgaatgacaacattgaccacaatcataaagatgctcagacagtgaaggctgttctcagggacttctatgaatccatgttccccataccttcccaatttgaactgccaagagagtatcgaaaccgtttccttcatatgcatgagctgcaggaatggagggcttatcgagacaaattgaagttttggacccattgtgtactagcaacattgattatgtttactatattctcattttttgctgagcagttaattgcacttaagcggaagatatttcccagaaggaggatacacaaagaagctagtcccaatcgaatcagagtatag

SEQ ID NO: 83 - DNA, 1242 bp, Homo sapiens
atggcacctccgtcagtctttgccgaggttccgcaggcccagcctgtcctggtcttcaagctcactgccgacttcagggaggatccggacccccgcaaggtcaacctgggagtgggagcatatcgcacggatgactgccatccctgggttttgccagtagtgaagaaagtggagcagaagattgctaatgacaatagcctaaatcacgagtatctgccaatcctgggcctggctgagttccggagctgtgcttctcgtcttgcccttggggatgacagcccagcactcaaggagaagcgggtaggaggtgtgcaatctttggggggaacaggtgcacttcgaattggagctgatttcttagcgcgttggtacaatggaacaaacaacaagaacacacctgtctatgtgtcctcaccaacctgggagaatcacaatgctgtgttttccgctgctggttttaaagacattcggtcctatcgctactgggatgcagagaagagaggattggacctccagggcttcctgaatgatctggagaatgctcctgagttctccattgttgtcctccacgcctgtgcacacaacccaactgggattgacccaactccggagcagtggaagcagattgcttctgtcatgaagcaccggtttctgttccccttctttgactcagcctatcagggcttcgcatctggaaacctggagagagatgcctgggccattcgctattttgtgtctgaaggcttcgagttcttctgtgcccagtccttctccaagaacttcgggctctacaatgagagagtcgggaatctgactgtggttggaaaagaacctgagagcatcctgcaagtcctttcccagatggagaagatcgtgcggattacttggtccaatccccccgcccagggagcacgaattgtggccagcaccctctctaaccctgagctctttgaggaatggacaggtaatgtgaagacaatggctgaccggattctgaccatgagatctgaactcagggcacgactagaagccctcaaaacccctgggacctggaaccacatcactgatcaaattggcatgttcagcttcactgggttgaaccccaagcaggttgagtatctggtcaatgaaaagcacatctacctgctgccaagtggtcgaatcaacgtgagtggcttaaccaccaaaaatctagattacgtggccacctccatccatgaagcagtcaccaaaatccagtga

SEQ ID NO: 84 - DNA, 1956 bp, Homo sapiens
atggcccgggggtcggcggttgcctgggcggcgctcgggccgttgttgtggggctgcgcgctggggctgcagggcgggatgctgtacccccaggagagcccgtcgcgggagtgcaaggagctggacggcctctggagcttccgcgccgacttctctgacaaccgacgccggggcttcgaggagcagtggtaccggcggccgctgtgggagtcaggccccaccgtggacatgccagttccctccagcttcaatgacatcagccaggactggcgtctgcggcattttgtcggctgggtgtggtacgaacgggaggtgatcctgccggagcgatggacccaggacctgcgcacaagagtggtgctgaggattggcagtgcccattcctatgccatcgtgtgggtgaatggggtcgacacgctagagcatgaggggggctacctccccttcgaggccgacatcagcaacctggtccaggtggggcccctgccctcccggctccgaatcactatcgccatcaacaacacactcacccccaccaccctgccaccagggaccatccaatacctgactgacacctccaagtatcccaagggttactttgtccagaacacatattttgactttttcaactacgctggactgcagcggtctgtacttctgtacacgacacccaccacctacatcgatgacatcaccgtcaccaccagcgtggagcaagacagtgggctggtgaattaccagatctctgtcaagggcagtaacctgttcaagttggaagtgcgtcttttggatgcagaaaacaaagtcgtggcgaatgggactgggacccagggccaacttaaggtgccaggtgtcagcctctggtggccgtacctgatgcacgaacgccctgcctatctgtattcattggaggtgcagctgactgcacagacgtcactggggcctgtgtctgacttctacacactccctgtggggatccgcactgtggctgtcaccaagagccagttcctcatcaatgggaaacctttctatttccacggtgtcaacaagcatgaggatgcggacatccgagggaagggcttcgactggccgctgctggtgaaggacttcaacctgcttcgctggcttggtgccaacgctttccgtaccagccactacccctatgcagaggaagtgatgcagatgtgtgaccgctatgggattgtggtcatcgatgagtgtcccggcgtgggcctggcgctgccgcagttcttcaacaacgtttctctgcatcaccacatgcaggtgatggaagaagtggtgcgtagggacaagaaccaccccgcggtcgtgatgtggtctgtggccaacgagcctgcgtcccacctagaatctgctggctactacttgaagatggtgatcgctcacaccaaatccttggacccctcccggcctgtgacctttgtgagcaactctaactatgcagcagacaagggggctccgtatgtggatgtgatctgtttgaacagctactactcttggtatcacgactacgggcacctggagttgattcagctgcagctggccacccagtttgagaactggtataagaagtatcagaagcccattattcagagcgagtatggagcagaaacgattgcagggtttcaccaggatccacctctgatgttcactgaagagtaccagaaaagtctgctagagcagtaccatctgggtctggatcaaaaacgcagaaaatacgtggttggagagctcatttggaattttgccgatttcatgactgaacagtcaccgacgagagtgctggggaataaaaaggggatcttcactcggcagagacaaccaaaaagtgcagcgttccttttgcgagagagatactggaagattgccaatgaaaccaggtatccccactcagtagccaagtcacaatgtttggaaaacagcctgtttacttga

SEQ ID NO: 85 - DNA, 660 bp, Homo sapiens
atgtccgagactgcgcctgccgcgcccgctgctccggcccctgccgagaagactcccgtgaagaagaaggcccgcaagtctgcaggtgcggccaagcgcaaagcgtctgggcccccggtgtccgagctcattactaaagctgttgccgcctccaaggagcgcagcggcgtatctttggccgctctcaagaaagcgctggcagccgctggctatgacgtggagaagaacaacagccgcatcaagctgggtctcaagagcctggtgagcaagggcaccctggtgcagaccaagggcaccggcgcgtcgggttccttcaaactcaacaagaaggcggcctctggggaagccaagcctaaggctaaaaaggcaggcgcggccaaggccaagaagccagcaggagcggcgaagaagcccaagaaggcgacgggggcggccacccccaagaagagcgccaagaagaccccaaagaaggcgaagaagccggctgcagctgctggagccaaaaaagcgaaaagcccgaaaaaggcgaaagcagccaagccaaaaaaggcgcccaagagcccagcgaaggccaaagcagttaaacccaaggcggctaaaccaaagaccgccaagcccaaggcagccaagccaaagaaggcggcagccaagaaaaagtag

SEQ ID NO: 86 - DNA, 1098 bp, Homo sapiens
atggccgtcatggcgccccgaaccctcctcctgctactctcgggggccctggccctgacccagacctgggcgggctcccactccatgaggtatttcttcacatccgtgtcccggcccggccgcggggagccccgcttcatcgccgtgggctacgtggacgacacgcagttcgtgcggttcgacagcgacgccgcgagccagaggatggagccgcgggcgccgtggatagagcaggaggggccggagtattgggaccaggagacacggaatgtgaaggcccagtcacagactgaccgagtggacctggggaccctgcgcggctactacaaccagagcgaggccggttctcacaccatccagataatgtatggctgcgacgtggggtcggacgggcgcttcctccgcgggtaccggcaggacgcctacgacggcaaggattacatcgccctgaacgaggacctgcgctcttggaccgcggcggacatggcggctcagatcaccaagcgcaagtgggaggcggcccatgaggcggagcagttgagagcctacctggatggcacgtgcgtggagtggctccgcagatacctggagaacgggaaggagacgctgcagcgcacggacccccccaagacacatatgacccaccaccccatctctgaccatgaggccaccctgaggtgctgggccctgggcttctaccctgcggagatcacactgacctggcagcgggatggggaggaccagacccaggacacggagctcgtggagaccaggcctgcaggggatggaaccttccagaagtgggcggctgtggtggtgccttctggagaggagcagagatacacctgccatgtgcagcatgagggtctgcccaagcccctcaccctgagatgggagctgtcttcccagcccaccatccccatcgtgggcatcattgctggcctggttctccttggagctgtgatcactggagctgtggtcgctgccgtgatgtggaggaggaagagctcagatagaaaaggagggagttacactcaggctgcaagcagtgacagtgcccagggctctgatgtgtccctcacagcttgtaaagtgtga

SEQ ID NO: 87 - DNA, 1089 bp, Homo sapiens
atgctggtcatggcgccccgaaccgtcctcctgctgctctcggcggccctggccctgaccgagacctgggccggctcccactccatgaggtatttctacacctccgtgtcccggcccggccgcggggagccccgcttcatctcagtgggctacgtggacgacacccagttcgtgaggttcgacagcgacgccgcgagtccgagagaggagccgcgggcgccgtggatagagcaggaggggccggagtattgggaccggaacacacagatctacaaggcccaggcacagactgaccgagagagcctgcggaacctgcgcggctactacaaccagagcgaggccgggtctcacaccctccagagcatgtacggctgcgacgtggggccggacgggcgcctcctccgcgggcatgaccagtacgcctacgacggcaaggattacatcgccctgaacgaggacctgcgctcctggaccgccgcggacacggcggctcagatcacccagcgcaagtgggaggcggcccgtgaggcggagcagcggagagcctacctggagggcgagtgcgtggagtggctccgcagatacctggagaacgggaaggacaagctggagcgcgctgaccccccaaagacacacgtgacccaccaccccatctctgaccatgaggccaccctgaggtgctgggccctgggtttctaccctgcggagatcacactgacctggcagcgggatggcgaggaccaaactcaggacactgagcttgtggagaccagaccagcaggagatagaaccttccagaagtgggcagctgtggtggtgccttctggagaagagcagagatacacatgccatgtacagcatgaggggctgccgaagcccctcaccctgagatgggagccgtcttcccagtccaccgtccccatcgtgggcattgttgctggcctggctgtcctagcagttgtggtcatcggagctgtggtcgctgctgtgatgtgtaggaggaagagttcaggtggaaaaggagggagctactctcaggctgcgtgcagcgacagtgcccagggctctgatgtgtctctcacagcttga

SEQ ID NO: 88 - DNA, 513 bp, Homo sapiens
atgacggaatataagctggtggtggtgggcgccggcggtgtgggcaagagtgcgctgaccatccagctgatccagaaccattttgtggacgaatacgaccccactatagaggattcctaccggaagcaggtggtcattgatggggagacgtgcctgttggacatcctggataccgccggccaggaggagtacagcgccatgcgggaccagtacatgcgcaccggggagggcttcctgtgtgtgtttgccatcaacaacaccaagtcttttgaggacatccaccagtacagggagcagatcaaacgggtgaaggactcggatgacgtgcccatggtgctggtggggaacaagtgtgacctggctgcacgcactgtggaatctcggcaggctcaggacctcgcccgaagctacggcatcccctacatcgagacctcggccaagacccggcagggcagccgctctggctctagctccagctccgggaccctctgggaccccccgggacccatgtga

SEQ ID NO: 89 - DNA, 1245 bp, Homo sapiens
atgtccaaaaaaatcagtggcggttctgtggtagagatgcaaggagatgaaatgacacgaatcatttgggaattgattaaagagaaactcatttttccctacgtggaattggatctacatagctatgatttaggcatagagaatcgtgatgccaccaacgaccaagtcaccaaggatgctgcagaagctataaagaagcataatgttggcgtcaaatgtgccactatcactcctgatgagaagagggttgaggagttcaagttgaaacaaatgtggaaatcaccaaatggcaccatacgaaatattctgggtggcacggtcttcagagaagccattatctgcaaaaatatcccccggcttgtgagtggatgggtaaaacctatcatcataggtcgtcatgcttatggggatcaatacagagcaactgattttgttgttcctgggcctggaaaagtagagataacctacacaccaagtgacggaacccaaaaggtgacatacctggtacataactttgaagaaggtggtggtgttgccatggggatgtataatcaagataagtcaattgaagattttgcacacagttccttccaaatggctctgtctaagggttggcctttgtatctgagcaccaaaaacactattctgaagaaatatgatgggcgttttaaagacatctttcaggagatatatgacaagcagtacaagtcccagtttgaagctcaaaagatctggtatgagcataggctcatcgacgacatggtggcccaagctatgaaatcagagggaggcttcatctgggcctgtaaaaactatgatggtgacgtgcagtcggactctgtggcccaagggtatggctctctcggcatgatgaccagcgtgctggtttgtccagatggcaagacagtagaagcagaggctgcccacgggactgtaacccgtcactaccgcatgtaccagaaaggacaggagacgtccaccaatcccattgcttccatttttgcctggaccagagggttagcccacagagcaaagcttgataacaataaagagcttgccttctttgcaaatgctttggaagaagtctctattgagacaattgaggctggcttcatgaccaaggacttggctgcttgcattaaaggtttacccaatgtgcaacgttctgactacttgaatacatttgagttcatggataaacttggagaaaacttgaagatcaaactagctcaggccaaactttaa

SEQ ID NO: 90 - DNA, 1359 bp, Homo sapiens
atggccggctacctgcgggtcgtgcgctcgctctgcagagcctcaggctcgcggccggcctgggcgccggcggccctgacagcccccacctcgcaagagcagccgcggcgccactatgccgacaaaaggatcaaggtggcgaagcccgtggtggagatggatggtgatgagatgacccgtattatctggcagttcatcaaggagaagctcatcctgccccacgtggacatccagctaaagtattttgacctcgggctcccaaaccgtgaccagactgatgaccaggtcaccattgactctgcactggccacccagaagtacagtgtggctgtcaagtgtgccaccatcacccctgatgaggcccgtgtggaagagttcaagctgaagaagatgtggaaaagtcccaatggaactatccggaacatcctgggggggactgtcttccgggagcccatcatctgcaaaaacatcccacgcctagtccctggctggaccaagcccatcaccattggcaggcacgcccatggcgaccagtacaaggccacagactttgtggcagaccgggccggcactttcaaaatggtcttcaccccaaaagatggcagtggtgtcaaggagtgggaagtgtacaacttccccgcaggcggcgtgggcatgggcatgtacaacaccgacgagtccatctcaggttttgcgcacagctgcttccagtatgccatccagaagaaatggccgctgtacatgagcaccaagaacaccatactgaaagcctacgatgggcgtttcaaggacatcttccaggagatctttgacaagcactataagaccgacttcgacaagaataagatctggtatgagcaccggctcattgatgacatggtggctcaggtcctcaagtcttcgggtggctttgtgtgggcctgcaagaactatgacggagatgtgcagtcagacatcctggcccagggctttggctcccttggcctgatgacgtccgtcctggtctgccctgatgggaagacgattgaggctgaggccgctcatgggaccgtcacccgccactatcgggagcaccagaagggccggcccaccagcaccaaccccatcgccagcatctttgcctggacacgtggcctggagcaccgggggaagctggatgggaaccaagacctcatcaggtttgcccagatgctggagaaggtgtgcgtggagacggtggagagtggagccatgaccaaggacctggcgggctgcattcacggcctcagcaatgtgaagctgaacgagcacttcctgaacaccacggacttcctcgacaccatcaagagcaacctggacagagccctgggcaggcagtag

SEQ ID NO: 91 - DNA, 1380 bp, Homo sapiens
atgacaattctaggtacaacttttggcatggttttttctttacttcaagtcgtttctggagaaagtggctatgctcaaaatggagacttggaagatgcagaactggatgactactcattctcatgctatagccagttggaagtgaatggatcgcagcactcactgacctgtgcttttgaggacccagatgtcaacatcaccaatctggaatttgaaatatgtggggccctcgtggaggtaaagtgcctgaatttcaggaaactacaagagatatatttcatcgagacaaagaaattcttactgattggaaagagcaatatatgtgtgaaggttggagaaaagagtctaacctgcaaaaaaatagacctaaccactatagttaaacctgaggctccttttgacctgagtgtcgtctatcgggaaggagccaatgactttgtggtgacatttaatacatcacacttgcaaaagaagtatgtaaaagttttaatgcacgatgtagcttaccgccaggaaaaggatgaaaacaaatggacgcatgtgaatttatccagcacaaagctgacactcctgcagagaaagctccaaccggcagcaatgtatgagattaaagttcgatccatccctgatcactattttaaaggcttctggagtgaatggagtccaagttattacttcagaactccagagatcaataatagctcaggggagatggatcctatcttactaaccatcagcattttgagttttttctctgtcgctctgttggtcatcttggcctgtgtgttatggaaaaaaaggattaagcctatcgtatggcccagtctccccgatcataagaagactctggaacatctttgtaagaaaccaagaaaaaatttaaatgtgagtttcaatcctgaaagtttcctggactgccagattcatagggtggatgacattcaagctagagatgaagtggaaggttttctgcaagatacgtttcctcagcaactagaagaatctgagaagcagaggcttggaggggatgtgcagagccccaactgcccatctgaggatgtagtcatcactccagaaagctttggaagagattcatccctcacatgcctggctgggaatgtcagtgcatgtgacgcccctattctctcctcttccaggtccctagactgcagggagagtggcaagaatgggcctcatgtgtaccaggacctcctgcttagccttgggactacaaacagcacgctgccccctccattttctctccaatctggaatcctgacattgaacccagttgctcagggtcagcccattcttacttccctgggatcaaatcaagaagaagcatatgtcaccatgtccagcttctaccaaaaccagtga

SEQ ID NO: 92 - DNA, 840 bp, Homo sapiens
atgttgagtcctgccaacggggagcagctccacctggtgaactatgtggaggactacctggactccatcgagtccctgcctttcgacttgcagagaaatgtctcgctgatgcgggagatcgacgcgaaataccaagagatcctgaaggagctagacgagtgctacgagcgcttcagtcgcgagacagacggggcgcagaagcggcggatgctgcactgtgtgcagcgcgcgctgatccgcagccaggagctgggcgacgagaagatccagatcgtgagccagatggtggagctggtggagaaccgcacgcggcaggtggacagccacgtggagctgttcgaggcgcagcaggagctgggcgacacagcgggcaacagcggcaaggctggcgcggacaggcccaaaggcgaggcggcagcgcaggctgacaagcccaacagcaagcgctcacggcggcagcgcaacaacgagaaccgtgagaacgcgtccagcaaccacgaccacgacgacggcgcctcgggcacacccaaggagaagaaggccaagacctccaagaagaagaagcgctccaaggccaaggcggagcgagaggcgtcccctgccgacctccccatcgaccccaacgaacccacgtactgtctgtgcaaccaggtctcctatggggagatgatcggctgcgacaacgacgagtgccccatcgagtggttccacttctcgtgcgtggggctcaatcataaacccaagggcaagtggtactgtcccaagtgccggggggagaacgagaagaccatggacaaagccctggagaaatccaaaaaagagagggcttacaacaggtag

SEQ ID NO: 93 - DNA, 3777 bp, Homo sapiens
atggcctcggcctgcggggcgccgggcccggggggcgccctgggcagccaggccccctcctggtaccaccgcgacctgagccgggcggccgcggaggagctgctggcccgggcgggccgcgatggcagcttcctggtccgagacagcgagagcgtggcgggggccttcgcgctctgcgtcctgtatcagaagcatgtgcacacgtatcgcattctgcctgatggagaagatttcttggctgtgcagacctcgcagggtgtgcctgtgcgccgcttccagaccctgggtgagctcatcggcctgtacgcccagcccaaccagggccttgtgtgcgccctgcttcttcctgtagagggtgagcgagagccggacccaccggatgaccgggatgcctcagatggggaggatgagaagcccccgctgcccccgcgctctggctccaccagcatttctgcccccactgggcccagcagtcccctgccagctcctgagactcccacagctccagctgctgagagtgctcccaatgggctgagcaccgtctcgcacgactacctgaaaggcagctatgggctggacctggaagctgtgaggggtggagccagccacctgccccacctcacccgtaccctcgctacctcatgccggaggctgcacagtgaggtggacaaggtcctgtcaggcctggagatcctgtccaaggtgtttgaccagcagagctcgcccatggtgacccgccttttgcagcagcagaacctgccacagacaggggagcaggaactagagagcctggtgctgaagctgtcagtgctaaaggacttcctgtcaggcatccagaagaaggccctgaaggccctacaggacatgagctccacagcacccccagctccgcagccatccacacgtaaggccaagaccatccccgtgcaggcctttgaggtgaagctagatgtgaccctgggtgacctgaccaagattgggaagtcacagaagttcacgctgagcgtggatgtggagggtgggcggctggtgctgctgcggagacagcgggactcccaggaggactggaccaccttcacgcacgaccgcatccgccagctcattaagtcccagcgtgtccagaacaagctgggtgttgtgtttgagaaggagaaggaccggactcagcgcaaggacttcatctttgtcagtgcccggaagcgggaggccttctgccagctgttgcagctcatgaagaacaagcactccaagcaggacgagcccgacatgatctcagtcttcataggcacctggaacatgggaagtgtaccacctccaaaaaacgtgacatcctggttcacatcgaagggtctggggaagaccctggacgaggtcacagtgaccataccccatgacatctatgtctttgggacccaggagaactcagtgggcgaccgcgagtggctggacctactgcgcgggggcctcaaggagcttacggatctggattaccgcccgattgccatgcaatcactgtggaatatcaaggtggcagtgctggtcaagccagagcacgagaaccgtatcagccatgtcagtacgtccagtgtgaagactggcatcgccaacaccctggggaacaagggggctgtgggcgtctccttcatgtttaatggcacctcatttggctttgtgaattgtcacctcacctcgggaaatgagaagacggctcggaggaaccaaaactacttggacatcctgcggctgctctcgctgggcgaccggcagctcaatgcctttgacatctctctgcgtttcacacacctcttctggtttggggacctcaactaccgcctggacatggatatccaggagatcctgaactacatcagcaggaaagagtttgagcccctcctcagggtggaccagctcaacctggagcgggagaagcacaaggtcttccttcgattcagtgaggaggagatctccttcccacccacctaccgctatgagcggggttcccgggacacatatgcctggcacaagcagaagccaactggggtccggaccaatgtgccctcatggtgtgaccggattctgtggaaatcctaccctgaaactcacatcatctgcaattcttatggttgcactgatgacatcgtcaccagcgaccattcccccgtgtttgggacatttgaggttggagttacctcccagttcatctccaagaaagggctctcaaagacttcagaccaggcctacattgagtttgagagcatcgaggccattgtgaagacagccagccgcaccaagttcttcatcgagttctactctacctgcctggaggaatacaagaagagctttgagaatgatgcccagagcagtgacaacatcaacttcctcaaagtgcagtggtcttcacgccagctgcccacgctcaaaccaattctggctgatatcgagtacctgcaggaccagcacctcctgctcacagtcaagtccatggatggctatgaatcctatggggagtgtgtggttgcactcaaatccatgatcggcagcacggcccaacagttcctgaccttcctatcccaccgtggcgaggagacaggcaatatcagaggctccatgaaggtgcgggtgcccacggagcgcctgggcacccgtgagcggctctacgagtggatcagcattgataaggatgaggcaggagcaaagagcaaagccccctctgtgtcccgagggagccaggagcccaggtcagggagccgcaagccagccttcacagaggcctcctgcccgctctccaggttatttgaagaaccagagaaaccgccaccaacggggaggcccccagccccaccccgagcagctccccgggaggagcccttgacccccaggttgaagccagagggagctcctgaaccagaaggggtggcggcccccccacccaagaacagcttcaataaccctgcctactacgtccttgaaggggtcccgcaccagctgctgcccccggagccaccctcgcctgccagggcccctgtcccatctgccaccaagaacaaagtggccattacagtgcctgctccacagcttgggcaccaccggcaccctcgtgtgggagaggggagttcttcagatgaggagtctggaggcacactgccccctccagactttccacctccaccactgccggactcagccatcttcctgccccccagcctggatcctttaccagggccagtggtccggggccgtggtggggctgaggcccgtggcccaccacctcccaaggcccatccaaggcctccactgcccccaggcccctcaccagccagcactttcctgggggaagtggccagtggggatgaccggtcctgctcggtgctgcagatggccaagacgctgagcgaggtggactatgcccctgctgggcctgcacgctcagcgctcctcccaggccccctggagctgcagcccccccggggactgccctcggactatggccggcccctcagcttccctccaccccgcatccgggagagcatccaggaagacctggcagaggaggctccgtgcctgcagggcgggcgggccagcgggctgggcgaggcaggcatgagtgcctggctgcgggccatcggcttggagcgctatgaggagggcctggtgcataatggctgggacgacctggagtttctcagtgacatcaccgaggaggacttggaggaggctggggtgcaggacccggctcacaagcgcctccttctggacaccctgcagctcagcaagtga

SEQ ID NO: 94 - DNA, 1389 bp, Homo sapiens
atggctgctactgtgaacttggaacttgatcccatttttttgaaagcactaggtttcttgcattcaaagagtaaagattctgctgaaaagctaaaagcactgcttgatgaatctttggctcggggcattgattccagttaccgtccatctcaaaaggatgtggagccacccaaaatttcaagcacaaaaaacatttccattaagcaagagcccaaaatatcatccagtcttccttctggtaataataatggcaaggtcctcacaactgaaaaggtaaagaaggaagctgaaaagagacctgctgataaaatgaaatcagacatcactgaaggagttgatattccaaagaaacctagattggagaaaccagaaacacagtcatctcccattactgtccaaagtagcaaggatttacctatggctgacctttccagttttgaggagaccagtgctgatgattttgccatggagatgggattggcctgcgttgtttgtaggcaaatgatggtggcatctggcaatcaattagtagaatgtcaggagtgccataatctctaccaccgagattgtcataaaccccaggtgacagacaaggaagcgaatgaccctcgcctggtgtggtattgtgcccgatgtaccagacaaatgaaaagaatggctcaaaaaactcagaaaccaccgcagaaaccagcccctgcagttgtttctgtaactccagctgtcaaagatccattggttaagaaaccagaaactaaactgaaacaagagacaacttttctagcgtttaagagaacagaagtcaagacatccacagttatttcaggaaattcttctagtgccagcgtttcctcgtcagtaactagtggcttaactggatgggcagcttttgcagccaaaacttcctctgctggtccttcaacagcaaaattgagttcaacaacacaaaacaatactgggaaacctgctacttcgtcagctaaccagaaacctgtgggtttgactggtctggcaacatcatccaaaggtggaataggttccaaaataggttccaataacagcactacgcccactgtacctttaaaaccacctccacctctaaccttgggtaaaactggccttagtcgctcagttagttgtgacaatgtcagcaaagtaggtcttcctagtccaagtagtttagttccaggaagcagcagccaactaagtgggaatggaaatagtggaacatcaggacctagtggaagtactaccagcaaaactacttcagaatccagcagctctccctcagcatcccttaaaggcccaacttcacaagaatcacagctcaatgctatgaagcgattacagatggtcaagaagaaagctgcccaaaagaaactcaagaagtaa

SEQ ID NO: 95 - DNA, 3117 bp, Homo sapiens
atggaccccaacaccattatcgaggccctgcggggcactatggacccagccctgcgtgaggccgcggagcgccagctcaatgaagcacacaagtctctgaattttgtctcaacactgctccagattactatgtcggaacagctggatttacctgtgagacaggcaggtgttatctatctgaaaaatatgataacacagtattggcctgatcgagaaacagcaccaggggatatatccccttatactattccagaagaagatcgccattgtattcgagaaaatattgtagaagccattatccattctcctgagctcatcagggtacagcttactacatgcattcatcacatcatcaaacatgattatccaagccgctggactgccattgtggacaaaattggcttttatcttcagtccgataacagtgcttgttggctaggaattcttctttgcctttatcagcttgtgaaaaattatgagtataaaaaaccagaggagcggagtccattggtagcagcaatgcagcattttctgccagttctaaaggatcgttttatccagcttctttctgaccagtctgatcagtctgtcctcatccagaaacagatattcaagatcttctatgctcttgttcagtatacactaccactggaactgataaaccaacagaacctgacagaatggatagaaattttaaagactgttgtgaacagggatgtacctaatgaaacacttcaagttgaagaagatgatcgacctgagttaccatggtggaaatgcaagaagtgggccttacatattttagcaagactttttgaaagatatggaagccctggcaatgtttccaaggagtataatgaatttgctgaagtatttctgaaggcatttgctgttggtgtccagcaagttttattgaaggtgttatatcagtacaaggagaagcaatatatggctcctcgagttttacaacagacattaaattatattaatcaaggagtttctcatgctctcacctggaagaatctgaagccccatatacaaggcattatccaagatgttatttttccattgatgtgctatacagatgctgatgaggaactttggcaagaagacccttacgaatatatacgcatgaagtttgatgtgtttgaagatttcatttctcctaccactgctgcccagacacttttgtttacagcctgtagtaagaggaaagaggtactgcaaaagactatgggattttgttaccagattcttacagaaccaaatgctgaccctcgaaaaaaagatggagccctgcatatgattggctctttagctgaaatacttctgaagaaaaagatctataaagatcagatggaatacatgttgcagaatcatgtattccctctcttcagcagtgaactaggctacatgagagcaagggcttgctgggtacttcactatttttgtgaagtgaagttcaaaagtgatcagaaccttcaaacagccttagagctaacaagaagatgtctgattgatgatagagaaatgcctgtgaaagtggaagctgccattgcccttcaagtattgatcagcaatcaagaaaaagctaaagaatatatcacaccattcatcagacctgtaatgcaggctcttcttcacattataagagaaacagaaaatgatgaccttaccaatgtaattcagaaaatgatctgtgaatatagtgaagaagttactcctattgcagtagaaatgacacaacatttggcaatgacatttaaccaagtaatccagacggggccagatgaagaaggtagtgatgacaaagcagttactgctatgggaattctgaatacaattgatacacttcttagtgtagttgaagatcataaagagataacccaacagcttgagggaatctgcttacaggtcattggtactgttttacaacagcatgtcttagaattctatgaggagatcttctctttagcgcacagtttgacatgtcaacaagtgtctccacagatgtggcagctactaccccttgtatttgaagtctttcagcaagatggctttgattactttacagatatgatgcccctccttcataattatgtaacagttgatacagacacacttctgtctgacaccaagtatcttgaaatgatatacagtatgtgcaaaaaggttcttacaggagttgcaggagaagatgcagagtgtcatgcagcaaaattgttagaggtcatcattctgcagtgcaaagggcgtggcattgaccagtgcattcccttattcgtggaagcagccttagaaagactgacaagagaggttaagacaagtgaacttcgaactatgtgtctgcaagttgcaattgcagctttgtattataatccacacctactactcaataccttagaaaatcttcgcttccctaataatgttgaaccagttacaaatcattttattacacagtggcttaatgatgttgactgtttcttggggcttcatgacagaaagatgtgtgttctcggactctgtgctcttattgatatggaacagataccccaagttttaaatcaggtttctggacagattttgccggcttttatccttttatttaacggattgaaaagagcatatgcctgccatgcagaacatgagaatgacagtgatgatgatgatgaagctgaagatgatgatgaaaccgaggaactggggagtgatgaagatgatattgatgaagatgggcaagaatatttggagattctggctaagcaggctggtgaagatggagatgatgaagattgggaagaagatgatgctgaagagactgctctggaaggctattccacaatcattgatgatgaagataaccctgttgatgagtatcagatatttaaagctatctttcaaactattcaaaatcgtaatcctgtgtggtatcaggcactgactcacggtcttaatgaagaacaaagaaaacagttacaggacatagcaactctggctgatcaaagaagagcagcccatgaatccaaaatgattgagaagcatggaggatacaaattcagtgctccagttgtgccaagttctttcaattttggaggcccagcaccagggatgaattga

SEQ ID NO: 96 - DNA, 1356 bp, Homo sapiens
atgaacctggagggcggcggccgaggcggagagttcggcatgagcgcggtgagctgcggcaacgggaagctccgccagtggctgatcgaccagatcgacagcggcaagtaccccgggctggtgtgggagaacgaggagaagagcatcttccgcatcccctggaagcacgcgggcaagcaggactacaaccgcgaggaggacgccgcgctcttcaaggcttgggcactgtttaaaggaaagttccgagaaggcatcgacaagccggaccctcccacctggaagacgcgcctgcggtgcgctttgaacaagagcaatgactttgaggaactggttgagcggagccagctggacatctcagacccgtacaaagtgtacaggattgttcctgagggagccaaaaaaggagccaagcagctcaccctggaggacccgcagatgtccatgagccacccctacaccatgacaacgccttacccttcgctcccagcccagcaggttcacaactacatgatgccacccctcgaccgaagctggagggactacgtcccggatcagccacacccggaaatcccgtaccaatgtcccatgacgtttggaccccgcggccaccactggcaaggcccagcttgtgaaaatggttgccaggtgacaggaaccttttatgcttgtgccccacctgagtcccaggctcccggagtccccacagagccaagcataaggtctgccgaagccttggcgttctcagactgccggctgcacatctgcctgtactaccgggaaatcctcgtgaaggagctgaccacgtccagccccgagggctgccggatctcccatggacatacgtatgacgccagcaacctggaccaggtcctgttcccctacccagaggacaatggccagaggaaaaacattgagaagctgctgagccacctggagaggggcgtggtcctctggatggcccccgacgggctctatgcgaaaagactgtgccagagcaggatctactgggacgggcccctggcgctgtgcaacgaccggcccaacaaactggagagagaccagacctgcaagctctttgacacacagcagttcttgtcagagctgcaagcgtttgctcaccacggccgctccctgccaagattccaggtgactctatgctttggagaggagtttccagaccctcagaggcaaagaaagctcatcacagctcacgtagaacctctgctagccagacaactatattattttgctcaacaaaacagtggacatttcctgaggggctacgatttaccagaacacatcagcaatccagaagattaccacagatctatccgccattcctctattcaagaatga

SEQ ID NO: 97 - DNA, 2841 bp, Homo sapiens
atggctgtgtactgctatgcgctcaatagcctggtgatcatgaatagcgccaacgagatgaagagcggcggcggcccggggcccagtggcagcgagacgcccccgcccccgaggagggcagtgctgagccccggcagcgttttcagccccgggagaggcgcctctttcctcttccccccagccgagtcgctgtcccccgaggagccccggagccccgggggctggcggagcggccggcgcaggctgaatagtagcagcggcagtggcagcggcagcagcggcagtagcgtgagcagcccaagttgggctggtcgcctgcgaggggaccggcagcaggtggtggcagccggtaccctctccccgccagggccggaggaggccaagaggaagctgcggatcttgcagcgcgagttgcagaacgtgcaggtgaaccagaaagtgggcatgtttgaggcgcacatccaggcacagagctccgccattcaagcgccccgcagcccgcgtttgggcagggctcgctcgccctccccgtgccccttccgcagcagcagtcagccccctggaagggtcctggttcagggcgcccggagcgaggaacggaggacaaagtcctggggggagcaatgtccagagacttcaggaaccgactccgggaggaaaggagggcccagcctatgctcctcgcaggtgaagaaaggaatgccacctcttcccggccgggctgcccctacaggatcagaggctcagggtccatccgcttttgtaaggatggagaagggtatccctgccagtccccgctgtggctcacccacagctatggaaattgacaaaaggggctctcctaccccgggaactcggagctgcctagctccctcattggggctgttcggagctagcttaacgatggccacggaagtggcagcgagagttacatccactgggccacaccgtccacaggatcttgccctcactgagccgtctgggagagcccgtgagcttgaggacctgcagcccccagaggccctggtggagaggcaggggcagtttctgggcagtgagacaagcccagccccagaaaggggcgggccccgcgatggagaaccccctgggaagatggggaaaggatatctgccctgtggcatgccgggctctggggagcctgaagtgggcaaaaggccagaggagacgactgtgagcgtgcaaagcgcagagtcctctgattccctgagctggtccaggctgcccagggccctggcctccgtaggccctgaggaggcccgaagtggggcccccgtgggcggggggcgttggcagctctccgacagagtggagggagggtccccaacgctgggcttgcttgggggcagcccctcagcacagccggggaccgggaatgtggaggcgggaattccttctggcagaatgctggagcctttgccctgttgggacgctgcgaaagatctgaaagaacctcagtgccctcctggggacagggtgggtgtgcagcctgggaactccagggtttggcagggcaccatggagaaagccggtttggcttggacgcgtggcacaggggtgcaatcagaggggacttgggaaagccagcggcaggacagtgatgccctcccaagtccggagctgctaccccaagatccggacaagcctttcctgaggaaggcctgcagccccagcaacatacctgctgtcatcattacagacatgggcacccaggaggatggggccttggaggagacgcagggaagccctcggggcaacctgcccctgaggaaactgtcctcttcctcggcctcctccacgggcttctcctcatcctacgaagactcagaggaggacatctccagtgaccctgagcgcaccctggaccccaactcagccttcctgcataccctggaccagcagaaacctagagtgagcaaatcatggaggaagataaaaaacatggtgcactggtctcccttcgtcatgtccttcaagaagaagtacccctggatccagctggcaggacacgcagggagtttcaaggcagctgccaatggcaggatcctgaagaagcactgtgagtcagagcagcgctgcctggaccggctgatggtggatgtgctgaggcccttcgtacctgcctaccatggggatgtggtgaaggacggggagcgctacaaccagatggacgacctgctggccgacttcgactcgccctgtgtgatggactgcaagatgggaatcaggacctacctggaggaggagctcacgaaggcccggaagaagcccagcctgcggaaggacatgtaccagaagatgatcgaggtggaccccgaggcccccaccgaggaggaaaaagcacagcgggctgtgaccaagccacggtacatgcagtggcgggagaccatcagctccacggccaccctggggttcaggatcgagggaatcaagaaagaagacggcaccgtgaaccgggacttcaagaagaccaaaacgagggagcaggtcaccgaggccttcagagagttcactaaaggaaaccataacatcctgatcgcctatcgggaccggctgaaggccattcgaaccactctagaagtttctcccttcttcaagtgccacgaggtcattggcagctccctcctcttcatccacgacaagaaggaacaggccaaagtgtggatgatcgactttgggaaaaccacgcccctgcctgagggccagaccctgcagcatgacgtcccctggcaggaggggaaccgggaggatggctacctctcggggctcaataacctcgtcgacatcctgaccgagatgtcccaggatgccccactcgcctga

SEQ ID NO: 98 - DNA, 3465 bp, Homo sapiens
atgcagtatctaaatataaaagaggactgcaatgccatggctttctgtgctaaaatgaggagctccaagaagactgaggtgaacctggaggcccctgagccaggggtggaagtgatcttctatctgtcggacagggagcccctccggctgggcagtggagagtacacagcagaggaactgtgcatcagggctgcacaggcatgccgtatctctcctctttgtcacaacctctttgccctgtatgacgagaacaccaagctctggtatgctccaaatcgcaccatcaccgttgatgacaagatgtccctccggctccactaccggatgaggttctatttcaccaattggcatggaaccaacgacaatgagcagtcagtgtggcgtcattctccaaagaagcagaaaaatggctacgagaaaaaaaagattccagatgcaacccctctccttgatgccagctcactggagtatctgtttgctcagggacagtatgatttggtgaaatgcctggctcctattcgagaccccaagaccgagcaggatggacatgatattgagaacgagtgtctagggatggctgtcctggccatctcacactatgccatgatgaagaagatgcagttgccagaactgcccaaggacatcagctacaagcgatatattccagaaacattgaataagtccatcagacagaggaaccttctcaccaggatgcggataaataatgttttcaaggatttcctaaaggaatttaacaacaagaccatttgtgacagcagcgtgtccacgcatgacctgaaggtgaaatacttggctaccttggaaactttgacaaaacattacggtgctgaaatatttgagacttccatgttactgatttcatcagaaaatgagatgaattggtttcattcgaatgacggtggaaacgttctctactacgaagtgatggtgactgggaatcttggaatccagtggaggcataaaccaaatgttgtttctgttgaaaaggaaaaaaataaactgaagcggaaaaaactggaaaataaacacaagaaggatgaggagaaaaacaagatccgggaagagtggaacaatttttcttacttccctgaaatcactcacattgtaataaaggagtctgtggtcagcattaacaagcaggacaacaagaaaatggaactgaagctctcttcccacgaggaggccttgtcctttgtgtccctggtagatggctacttccggctcacagcagatgcccatcattacctctgcaccgacgtggcccccccgttgatcgtccacaacatacagaatggctgtcatggtccaatctgtacagaatacgccatcaataaattgcggcaagaaggaagcgaggaggggatgtacgtgctgaggtggagctgcaccgactttgacaacatcctcatgaccgtcacctgctttgagaagtctgagcaggtgcagggtgcccagaagcagttcaagaactttcagatcgaggtgcagaagggccgctacagtctgcacggttcggaccgcagcttccccagcttgggagacctcatgagccacctcaagaagcagatcctgcgcacggataacatcagcttcatgctaaaacgctgctgccagcccaagccccgagaaatctccaacctgctggtggctactaagaaagcccaggagtggcagcccgtctaccccatgagccagctgagtttcgatcggatcctcaagaaggatctggtgcagggcgagcaccttgggagaggcacgagaacacacatctattctgggaccctgatggattacaaggatgacgaaggaacttctgaagagaagaagataaaagtgatcctcaaagtcttagaccccagccacagggatatttccctggccttcttcgaggcagccagcatgatgagacaggtctcccacaaacacatcgtgtacctctatggcgtctgtgtccgcgacgtggagaatatcatggtggaagagtttgtggaagggggtcctctggatctcttcatgcaccggaaaagcgatgtccttaccacaccatggaaattcaaagttgccaaacagctggccagtgccctgagctacttggaggataaagacctggtccatggaaatgtgtgtactaaaaacctcctcctggcccgtgagggcatcgacagtgagtgtggcccattcatcaagctcagtgaccccggcatccccattacggtgctgtctaggcaagaatgcattgaacgaatcccatggattgctcctgagtgtgttgaggactccaagaacctgagtgtggctgctgacaagtggagctttggaaccacgctctgggaaatctgctacaatggcgagatccccttgaaagacaagacgctgattgagaaagagagattctatgaaagccggtgcaggccagtgacaccatcatgtaaggagctggctgacctcatgacccgctgcatgaactatgaccccaatcagaggcctttcttccgagccatcatgagagacattaataagcttgaagagcagaatccagatattgtttcagaaaaaaaaccagcaactgaagtggaccccacacattttgaaaagcgcttcctaaagaggatccgtgacttgggagagggccactttgggaaggttgagctctgcaggtatgaccccgaaggggacaatacaggggagcaggtggctgttaaatctctgaagcctgagagtggaggtaaccacatagctgatctgaaaaaggaaatcgagatcttaaggaacctctatcatgagaacattgtgaagtacaaaggaatctgcacagaagacggaggaaatggtattaagctcatcatggaatttctgccttcgggaagccttaaggaatatcttccaaagaataagaacaaaataaacctcaaacagcagctaaaatatgccgttcagatttgtaaggggatggactatttgggttctcggcaatacgttcaccgggacttggcagcaagaaatgtccttgttgagagtgaacaccaagtgaaaattggagacttcggtttaaccaaagcaattgaaaccgataaggagtattacaccgtcaaggatgaccgggacagccctgtgttttggtatgctccagaatgtttaatgcaatctaaattttatattgcctctgacgtctggtcttttggagtcactctgcatgagctgctgacttactgtgattcagattctagtcccatggctttgttcctgaaaatgataggcccaacccatggccagatgacagtcacaagacttgtgaatacgttaaaagaaggaaaacgcctgccgtgcccacctaactgtccagatgaggtttatcaacttatgaggaaatgctgggaattccaaccatccaatcggacaagctttcagaaccttattgaaggatttgaagcacttttaaaataa

SEQ ID NO: 99 - DNA, 4140 bp, Homo sapiens
atggagccggggtccgacgatttcctaccgccaccggagtgcccggtgttcgagcctagctgggccgagttccgagaccctcttggctacatcgcgaaaatcaggcccatcgcagagaaatcgggcatttgcaagatccgcccacccgcgattgtggtggaggaaggtggttatgaagctatctgcaaggaccgtcggtgggctcgggtagcccagcgcctcaactatccaccaggcaaaaatattggctccttgctacgctcccactacgaacgcattgtttatccctatgaaatgtaccagtctggagccaaccttgtgcagtgtaacacacgtccatttgataatgaggagaaggacaaggaatacaaaccccacagcatccccctacgacagtctgtgcagccttccaagttcaacagctatggccggcgggccaagagactgcagcctgatccggaacccacagaggaagacattgagaagaatccagagctgaaaaagctacagatctatggggcaggccccaagatgatgggcctgggcctcatggccaaagacaagactctgcggaagaaagataaggaggggcctgagtgtccccccacagtagtggtgaaggaggagttaggtggggatgtgaaggtggagtcaacatcgcctaagaccttcctggagagcaaggaggagctgagtcacagcccagaaccctgcaccaagatgaccatgaggctacggaggaaccacagcaatgcccagtttattgagtcatatgtctgccggatgtgttctcgaggggatgaggatgacaagctcctgctgtgtgatggctgtgatgacaactaccacatcttctgcctgctgcctcctctgcctgagatccccaagggtgtctggcggtgcccaaagtgtgtcatggcggagtgtaagcggcccccagaagcctttggctttgagcaggctacccgggaatacactctgcagagctttggcgagatggccgactcctttaaagctgactacttcaacatgcccgtgcatatggtgcccacagaacttgtggagaaggagttctggaggctggtaaatagcattgaggaagatgtgactgttgagtatggagctgacatccattccaaagaatttggcagcggtttccctgtcagtgacagtaaacggcacctaacccccgaagaggaggagtatgctaccagtggttggaacctaaatgtgatgccggtgttggaacagtctgtactgtgccacatcaatgcagatatctctggcatgaaggtgccctggctctacgtgggcatggtcttctcagccttttgctggcatattgaggatcactggagttactccattaactacctccactggggtgagccgaagacctggtatggggtgccctcacttgcagcagaacatttggaagaagtgatgaagaagctgacacctgaactatttgatagccagcctgacctcctgcaccaacttgtcaccctcatgaatcccaacaccctcatgtcccatggtgtgccagttgtccgcacaaaccagtgtgcaggagagtttgtcatcaccttcccccgtgcttaccacagcggcttcaaccaaggctacaactttgccgaggctgtcaacttttgcactgctgactggttgcctgctgggcgccagtgcattgagcactaccgccggctccggagatactgcgtcttctcccatgaggagcttatctgcaagatggctgcctgcccagagaagctagacctgaacctggcggcagctgtgcataaggagatgttcatcatggtgcaagaagagcggcgtctacgaaaggccctgctggagaagggtatcacagaggctgagcgagaggctttcgagctgctcccagatgatgagcgccagtgtatcaagtgcaagactacgtgtttcctgtcagccctggcctgctacgactgcccagacggccttgtctgcctttcccacatcaatgatctctgcaagtgctccagtagccggcagtacctgcggtatcggtataccttggatgagcttcctgccatgctgcataagctgaaggttcgggctgagtcctttgacacctgggccaacaaagtgcgagtggccctggaggtggaggatgggcggaagcgcagccttgaagaactgagggcactagagtctgaagcccgtgagcggaggtttcctaatagtgagctgctgcagcaactaaagaactgcctgagtgaggcagaggcttgcgtgtcccgagctctgggactggtcagcggccaggaagctggcccccacagggtggctggtctacagatgaccctgactgagctccgggcctttctggaccagatgaacaacctgccttgcgccatgcaccagattggggatgtcaagggtgttctggaacaggtggaggcctaccaggctgaggctcgtgaggccctggcctcactgccctccagtccagggctactgcagtccctgttggagagggggcggcagctgggggtggaggtgcctgaggcccagcagctccagcggcaggtggaacaggcgcgatggctggatgaggtgaaacgcacactggccccctcagcccgaaggggcaccttggctgtcatgcgaggactgttggtcgcgggtgccagtgtagcccctagccctgctgtggataaagcccaggccgagctgcaggaactgctgaccattgctgaacgctgggaggagaaagcccacctctgcctggaggccaggcagaagcatccaccagccacacttgaggccataatccgtgaagcggaaaacatccctgttcacctgcccaacatccaggctctcaaggaggctcttgctaaggcccgggcctggattgctgatgttgatgagatccaaaatggtgaccactacccctgcctggatgacttggagggcctagtagctgtgggccgggacctacctgtggggctggaggagctgagacagctagagctacaggtactgacagcgcactcctggagggagaaggcctccaagaccttcctcaagaaaaattcttgctacacgctgctggaggttctctgcccatgtgcagatgccggctcagacagcaccaagcgcagccggtggatggagaaggagctggggttgtacaaatctgacacagagctgctggggctgtctgcgcaggacctcagggacccaggctctgtgatcgtggccttcaaggagggggaacagaaggagaaggagggtatcctgcagctgcgtcgcaccaattcggccaagcccagtccactggcatcatcgagcacggcctcctctacaacctctatctgtgtgtgtgggcaggtgctggctggggcgggagctctgcagtgtgacctgtgtcaggactggttccatgggcggtgtgtgtcagtgcctcgcctcctcagctctccgaggcccaatcccacctcatccccactgctggcctggtgggaatgggacaccaaattcctgtgtccactgtgtatgcgctcaaggcgcccgcgcctggagaccatcctggcactgctggtagccctgcagagactgcctgtgcggctgcccgagggcgaggccctgcagtgcctcacagagagggccatcagctggcaaggccgcgccaggcaggctctggcctctgaagatgtgactgctcttttgggacggctggctgagctccgccaacggctacaggctgaacctagacctgaggagcctcctaactaccctgcagcccctgcttctgaccccctcagagagggcagtggcaaggatatgcctaaggtccagggcttactggagaatggagacagtgtgaccagtcctgagaaggtagccccggaggagggctcagatctggagctgctgtcctcgctgttgccacagttgactggccctgtgttggaactgcctgaggcaacccgggcccccttggaggagctcatgatggagggggacctgctcgaggtgaccctggatgagaaccacagcatccctgagtcccttgacttttgtattctgactccaaggtattgttcagacctcagctcctgggggccggcccctggagtcttccctccctggtag

SEQ ID NO: 100 - DNA, 4290 bp, Homo sapiens
atggcggcgggaaaagcgagcggcgagagcgaggaggcgtcccccagcctgacagccgaggagagggaggcgctcggcggactggacagccgcctctttgggttcgtgagatttcatgaagatggcgccaggacgaaggccctactgggcaaggctgttcgctgctatgaatctctaatcttaaaagctgaaggaaaagtggagtctgatttcttttgtcaattaggtcacttcaacctcttattggaagattatccaaaagcattatctgcataccagaggtactacagtttacagtctgactactggaagaatgctgcctttttatatggtcttggtttggtctacttccattataatgcatttcagtgggcaattaaagcatttcaggaggtgctttatgttgatcccagcttttgtcgagccaaggaaattcatttacgacttgggcttatgttcaaagtgaacacagactatgagtctagtttaaagcattttcagttagctttggttgactgtaatccctgcactttgtccaatgctgaaattcaatttcacattgcccacttatatgaaacccagaggaaatatcattctgcaaaagaagcttatgaacaacttttgcagacagagaatctttctgcacaagtaaaagcaactgtcttacaacagttaggttggatgcatcacactgtagatctcctgggagataaagccaccaaggaaagctatgctattcagtatctccaaaagtccttggaagcagatcctaattctggccagtcctggtatttcctcggaaggtgctattcaagtattgggaaagttcaggatgcctttatatcttacaggcagtctattgataaatcagaagcaagtgcagatacatggtgttcaataggtgtgctatatcagcagcaaaatcagcccatggatgctttacaggcctatatttgtgctgtacaattggaccatggccatgctgcagcctggatggacctaggcactctctatgaatcctgcaaccagcctcaggatgccattaaatgctacttaaatgcaactagaagcaaaagttgtagtaatacctctgcacttgcagcacgaattaagtatttacaggctcagttgtgtaaccttccacaaggtagtctacagaataaaactaaattacttcctagtattgaggaggcgtggagcctaccaattcccgcagagcttacctccaggcagggtgccatgaacacagcacagcaggcatgtaaacctcatcatccaaatactgaacctgtattaggcctcagtcaaacaccaatttcacagcaatccttgccactacacatgattccttctagccaagtagatgacctgtccagtcctgccaagaggaaaagaacatctagtccaacaaagaatacttctgacaattggagtggtggacatgctgtgtcacatcctccagtacagcaacaagctcattcatggtgtttgacaccacagaaattacagcatttggaacagctccgcgcaaatagaaataatttaaatccagcacagaaactgatgctggaacagctggaaagtcagtttgtcttaatgcaacaacaccaaatgagaccaacaggagttgcacaggtacgatctactggaattcctaatgggccaacagctgactcatcactgcctacaaactcagtctctggccagcagccacagcttgctctgaccagagtgcctagcgtctctcagcctggagtccgtcctgcctgccctgggcagcctttggccaatggacccttttctgcaggccatgttccctgtagcacatcaagaacgctgggaagtacagacactattttgataggcaataatcatataacaggaagtggaagtaatggaaacgtgccttacctgcagcgaaacgcactcactctacctcataaccgcacaaacctgaccagcagcgcagaggagccgtggaaaaaccaactatctaactccactcaggggcttcacaaaggtcagagttcacattcggcaggtcctaatggtgaacgacctctctcttccactgggccttcccagcatctccaggcagctggctctggtattcagaatcagaacggacatcccaccctgcctagcaattcagtaacacagggggctgctctcaatcacctctcctctcacactgctacctcaggtggacaacaaggcattaccttaaccaaagagagcaagccttcaggaaacatattgacggtgcctgaaacaagcaggcacactggagagacacctaacagcactgccagtgtcgagggacttcctaatcatgtccatcagatgacggcagatgctgtttgcagtcctagccatggagattctaagtcaccaggtttactaagttcagacaatcctcagctctctgccttgttgatgggaaaagccaataacaatgtgggtactggaacctgtgacaaagtcaataacatccacccagctgttcatacaaagactgataactctgttgcctcttcaccatcttcagccatttcaacagcaacaccttctccaaaatccactgagcagacaaccacaaacagtgttaccagccttaacagccctcacagtgggctacacacaattaatggagaagggatggaagaatctcagagccccatgaaaacagatctgcttctggttaaccacaaacctagtccacagatcataccatcaatgtctgtgtccatataccccagctcagcagaagttctgaaggcatgcaggaatctaggtaaaaatggcttatctaacagtagcattttgttggataaatgtccacctccaagaccaccatcttcaccataccctcccttgccaaaggacaagttgaatccacctacacctagtatttacttggaaaataaacgtgatgctttctttcctccattacatcaattttgtacaaatccgaacaaccctgttacagtaatacgtggccttgctggagctcttaagttagacctgggacttttctctactaaaactttggtggaagctaacaatgaacatatggtagaagtgaggacacagttgttgcagccagcagatgaaaactgggatcccactggaacaaagaaaatctggcattgtgaaagtaatagatctcatactacaattgctaaatatgcacagtaccaggcctcctcattccaggaatcattgagagaagaaaatgaaaaaagaagtcatcataaagaccactcagatagtgaatctacatcgtcagataattctgggaggaggaggaaaggaccctttaaaaccataaagtttgggaccaatattgacctatctgatgacaaaaagtggaagttgcagctacatgagctgactaaacttcctgcttttgtgcgtgtcgtatcagcaggaaatcttctaagccatgttggtcataccatattgggcatgaacacagttcaactatacatgaaagttccagggagcagaacaccaggtcatcaggaaaataacaacttctgttcagttaacataaatattggcccaggtgactgtgaatggtttgttgttcctgaaggttactggggtgttctgaatgacttctgtgaaaaaaataatttgaatttcctaatgggttcttggtggcccaatcttgaagatctttatgaagcaaatgttccagtgtataggtttattcagcgacctggagatttggtctggataaatgcaggcactgttcattgggttcaggctattggctggtgcaacaacattgcttggaatgttggtccacttacagcctgccagtataaattggcagtggaacggtacgaatggaacaaattgcaaagtgtgaagtcaatagtacccatggttcatctttcctggaatatggcacgaaatatcaaggtctcagatccaaagctttttgaaatgattaagtattgtcttctaagaactctgaagcaatgtcagacattgagggaagctctcattgctgcaggaaaagagattatatggcatgggcggacaaaagaagaaccagctcattactgtagcatttgtgaagtggaggtttttgatctgctttttgtcactaatgagagtaattcacgaaagacctacatagtacattgccaagattgtgcacgaaaaacaagcggaaacttggaaaactttgtggtgctagaacagtacaaaatggaggacctgatgcaagtctatgaccaatttacattagctcctccattaccatccgcctcatcttga

SEQ ID NO: 101 - DNA, 1875 bp, Homo sapiens
atgcagccagatcccaggcctagcggggctggggcctgctgccgattcctgcccctgcagtcacagtgccctgagggggcaggggacgcggtgatgtacgcctccactgagtgcaaggcggaggtgacgccctcccagcatggcaaccgcaccttcagctacaccctggaggatcataccaagcaggcctttggcatcatgaacgagctgcggctcagccagcagctgtgtgacgtcacactgcaggtcaagtaccaggatgcaccggccgcccagttcatggcccacaaggtggtgctggcctcatccagccctgtcttcaaggccatgttcaccaacgggctgcgggagcagggcatggaggtggtgtccattgagggtatccaccccaaggtcatggagcgcctcattgaattcgcctacacggcctccatctccatgggcgagaagtgtgtcctccacgtcatgaacggtgctgtcatgtaccagatcgacagcgttgtccgtgcctgcagtgacttcctggtgcagcagctggaccccagcaatgccatcggcatcgccaacttcgctgagcagattggctgtgtggagttgcaccagcgtgcccgggagtacatctacatgcattttggggaggtggccaagcaagaggagttcttcaacctgtcccactgccaactggtgaccctcatcagccgggacgacctgaacgtgcgctgcgagtccgaggtcttccacgcctgcatcaactgggtcaagtacgactgcgaacagcgacggttctacgtccaggcgctgctgcgggccgtgcgctgccactcgttgacgccgaacttcctgcagatgcagctgcagaagtgcgagatcctgcagtccgactcccgctgcaaggactacctggtcaagatcttcgaggagctcaccctgcacaagcccacgcaggtgatgccctgccgggcgcccaaggtgggccgcctgatctacaccgcgggcggctacttccgacagtcgctcagctacctggaggcttacaaccccagtgacggcacctggctccggttggcggacctgcaggtgccgcggagcggcctggccggctgcgtggtgggcgggctgttgtacgccgtgggcggcaggaacaactcgcccgacggcaacaccgactccagcgccctggactgttacaaccccatgaccaatcagtggtcgccctgcgcccccatgagcgtgccccgtaaccgcatcggggtgggggtcatcgatggccacatctatgccgtcggcggctcccacggctgcatccaccacaacagtgtggagaggtatgagccagagcgggatgagtggcacttggtggccccaatgctgacacgaaggatcggggtgggcgtggctgtcctcaatcgtctcctttatgccgtggggggctttgacgggacaaaccgccttaattcagctgagtgttactacccagagaggaacgagtggcgaatgatcacagcaatgaacaccatccgaagcggggcaggcgtctgcgtcctgcacaactgtatctatgctgctgggggctatgatggtcaggaccagctgaacagcgtggagcgctacgatgtggaaacagagacgtggactttcgtagcccccatgaagcaccggcgaagtgccctggggatcactgtccaccaggggagaatctacgtccttggaggctatgatggtcacacgttcctggacagtgtggagtgttacgacccagatacagacacctggagcgaggtgacccgaatgacatcgggccggagtggggtgggcgtggctgtcaccatggagccctgccggaagcagattgaccagcagaactgtacctgttga

SEQ ID NO: 102 - DNA, 2199 bp, Homo sapiens
atggaaggtggggaccaaagtgaggaagagccgagggaacgcagccaggcaggtggaatgggaactctctggagccaagagagcactccagaagagaggctgcccgtggaagggagcaggccatgggcagtggccaggcgggtgctgacagctatcctgattttgggcctgctcctttgtttttctgtgcttttgttctacaacttccagaactgtggccctcgcccctgtgagacatctgtgtgtttggatctccgggatcattacctggcctctgggaacacaagtgtggccccctgcaccgacttcttcagctttgcctgtggaagggccaaagagaccaataattcttttcaggagcttgccacaaagaacaaaaaccgacttcggagaatactggaggtccagaattcctggcacccaggctctggggaggagaaagccttccagttctacaactcctgcatggatacacttgccattgaagctgcagggactggtcccctcagacaagttattgaggagcttggaggctggcgcatctctggtaaatggacttccttaaactttaaccgaacgctgagacttctgatgagtcagtatggccatttccctttcttcagagcctacctaggacctcatcctgcctctccacacacaccagtcatccagatagaccagccagagtttgatgttcccctcaagcaagatcaagaacagaagatctatgcccagatctttcgggaatacctgacttacctgaatcagctgggaaccttgctgggaggagacccaagcaaggtgcaagaacactcttccttgtcaatctccatcacttcacggctgttccagtttctgaggcccctggagcagcggcgggcacagggcaagctcttccagatggtcactatcgaccagctcaaggaaatggcccccgccatcgactggttgtcctgcttgcaagcgacattcacaccgatgtccctgagcccttctcagtccctcgtggtccatgacgtggaatatttgaaaaacatgtcacaactggtggaggagatgctgctaaagcagagggactttctgcagagccacatgatcttagggctggtggtgaccctttctccagccctggacagtcaattccaggaggcacgcagaaagctcagccagaaactgcgggaactgacagagcaaccacccatgcctgcccgcccacgatggatgaagtgcgtggaggagacaggcacgttcttcgagcccacgctggcggctttgtttgttcgtgaggcctttggcccgagcacccgaagtgctgccatgaaattattcactgcgatccgggatgccctcatcactcgcctcagaaaccttccctggatgaatgaggagacccagaacatggcccaggacaaggttgctcaactgcaggtggagatgggggcttcagaatgggccctgaagccagagctggcccgacaagaatacaacgatatacagcttggatcgagcttcctgcagtctgtcctgagctgtgtccggtccctccgagctagaattgtccagagcttcttgcagcctcacccccaacacaggtggaaggtgtccccttgggacgtcaatgcttactattcggtatctgaccatgtggtagtctttccagctggactcctccaacccccattcttccaccctggctatcccagagccgtgaactttggcgctgctggcagcatcatggcccacgagctgttgcacatcttctaccagctcttactgcctgggggctgcctcgcctgtgacaaccatgccctccaggaagctcacctgtgcctgaagcgccattatgctgcctttccattacctagcagaacctccttcaatgactccctcacattcttagagaatgctgcagacgttggggggctagccatcgcgctgcaggcatacagcaagaggctgttacggcaccatggggagactgtcctgcccagcctggacctcagcccccagcagatcttctttcgaagctatgcccaggtgatgtgtaggaagcccagcccccaggactctcacgacactcacagccctccacacctccgagtccacgggcccctcagcagcaccccagcctttgccaggtatttccgctgtgcacgtggtgctctcttgaacccctccagccgctgccagctctggtaa

SEQ ID NO: 103 - DNA, 2931 bp, Homo sapiens
atgagaggcgctcgcggcgcctgggattttctctgcgttctgctcctactgcttcgcgtccagacaggctcttctcaaccatctgtgagtccaggggaaccgtctccaccatccatccatccaggaaaatcagacttaatagtccgcgtgggcgacgagattaggctgttatgcactgatccgggctttgtcaaatggacttttgagatcctggatgaaacgaatgagaataagcagaatgaatggatcacggaaaaggcagaagccaccaacaccggcaaatacacgtgcaccaacaaacacggcttaagcaattccatttatgtgtttgttagagatcctgccaagcttttccttgttgaccgctccttgtatgggaaagaagacaacgacacgctggtccgctgtcctctcacagacccagaagtgaccaattattccctcaaggggtgccaggggaagcctcttcccaaggacttgaggtttattcctgaccccaaggcgggcatcatgatcaaaagtgtgaaacgcgcctaccatcggctctgtctgcattgttctgtggaccaggagggcaagtcagtgctgtcggaaaaattcatcctgaaagtgaggccagccttcaaagctgtgcctgttgtgtctgtgtccaaagcaagctatcttcttagggaaggggaagaattcacagtgacgtgcacaataaaagatgtgtctagttctgtgtactcaacgtggaaaagagaaaacagtcagactaaactacaggagaaatataatagctggcatcacggtgacttcaattatgaacgtcaggcaacgttgactatcagttcagcgagagttaatgattctggagtgttcatgtgttatgccaataatacttttggatcagcaaatgtcacaacaaccttggaagtagtagataaaggattcattaatatcttccccatgataaacactacagtatttgtaaacgatggagaaaatgtagatttgattgttgaatatgaagcattccccaaacctgaacaccagcagtggatctatatgaacagaaccttcactgataaatgggaagattatcccaagtctgagaatgaaagtaatatcagatacgtaagtgaacttcatctaacgagattaaaaggcaccgaaggaggcacttacacattcctagtgtccaattctgacgtcaatgctgccatagcatttaatgtttatgtgaatacaaaaccagaaatcctgacttacgacaggctcgtgaatggcatgctccaatgtgtggcagcaggattcccagagcccacaatagattggtatttttgtccaggaactgagcagagatgctctgcttctgtactgccagtggatgtgcagacactaaactcatctgggccaccgtttggaaagctagtggttcagagttctatagattctagtgcattcaagcacaatggcacggttgaatgtaaggcttacaacgatgtgggcaagacttctgcctattttaactttgcatttaaaggtaacaacaaagagcaaatccatccccacaccctgttcactcctttgctgattggtttcgtaatcgtagctggcatgatgtgcattattgtgatgattctgacctacaaatatttacagaaacccatgtatgaagtacagtggaaggttgttgaggagataaatggaaacaattatgtttacatagacccaacacaacttccttatgatcacaaatgggagtttcccagaaacaggctgagttttgggaaaaccctgggtgctggagctttcgggaaggttgttgaggcaactgcttatggcttaattaagtcagatgcggccatgactgtcgctgtaaagatgctcaagccgagtgcccatttgacagaacgggaagccctcatgtctgaactcaaagtcctgagttaccttggtaatcacatgaatattgtgaatctacttggagcctgcaccattggagggcccaccctggtcattacagaatattgttgctatggtgatcttttgaattttttgagaagaaaacgtgattcatttatttgttcaaagcaggaagatcatgcagaagctgcactttataagaatcttctgcattcaaaggagtcttcctgcagcgatagtactaatgagtacatggacatgaaacctggagtttcttatgttgtcccaaccaaggccgacaaaaggagatctgtgagaataggctcatacatagaaagagatgtgactcccgccatcatggaggatgacgagttggccctagacttagaagacttgctgagcttttcttaccaggtggcaaagggcatggctttcctcgcctccaagaattgtattcacagagacttggcagccagaaatatcctccttactcatggtcggatcacaaagatttgtgattttggtctagccagagacatcaagaatgattctaattatgtggttaaaggaaacgctcgactacctgtgaagtggatggcacctgaaagcattttcaactgtgtatacacgtttgaaagtgacgtctggtcctatgggatttttctttgggagctgttctctttaggaagcagcccctatcctggaatgccggtcgattctaagttctacaagatgatcaaggaaggcttccggatgctcagccctgaacacgcacctgctgaaatgtatgacataatgaagacttgctgggatgcagatcccctaaaaagaccaacattcaagcaaattgttcagctaattgagaagcagatttcagagagcaccaatcatatttactccaacttagcaaactgcagccccaaccgacagaagcccgtggtagaccattctgtgcggatcaattctgtcggcagcaccgcttcctcctcccagcctctgcttgtgcacgacgatgtctga

SEQ ID NO: 104 - DNA, 1863 bp, Homo sapiens
atggcttcagattctatgagtagtaaacaagctaggaatcacattacaaaggggaaaaggcaacaacagcaccagcaaataaagaacagatcctcaattagtgatggtgatggagaagattcctttatttttgaagcaaatgaagcttggaaagattttcatggttctcttcttcgattttatgaaaatggagaactctgtgatgtcacactcaaggttggctcaaagctaatctcttgtcacaagctggtattggcttgtgttattccctactttagagccatgtttctttctgaaatggctgaagccaagcaaacgctgattgagattagagattttgatggtgatgcaatagaagacttggtaaagtttgtctattcttcacggctcactttgactgttgacaatgtccagcctctcttatatgcagcctgtattctgcaggttgaactggtggctagagcttgttgtgaatacatgaagttacattttcatccctccaattgcctggcagtaagagcctttgcagaaagtcacaatcgaatagacttaatggacatggcggatcagtatgcctgtgaccattttactgaagtagtggagtgtgaagactttgtaagtgtatcaccgcagcacctccataagcttttgtcctccagtgatctaaatattgaaaatgaaaagcaggtctataatgctgccatcaagtggcttcttgccaatcctcagcatcattccaaatggttggatgaaacacttgcacaggttcgcctgccattgttgccggttgattttcttatgggtgttgtggcaaaagaacagattgtcaagcaaaatctaaaatgtagagatttactggatgaagcaagaaattaccaccttcacttgagtagcagagcagtacctgactttgaatactccattcggactaccccaaggaagcatactgctggtgtgctgttttgtgtaggtggtcgaggtggatctggtgacccctttcgcagtattgaatgctattctatcaacaaaaacagttggttctttggaccagaaatgaatagtcgaaggcgacatgtgggtgtaatctctgtggaaggtaaagtgtatgcagtaggtggacatgatggaaatgaacatttagggagtatggagatgtttgatcctctcactaataaatggatgatgaaggcatcaatgaacacaaagaggcgaggaattgccttggcttccttaggaggcccaatttatgcaattggagggttagatgacaatacttgcttcaatgatgtggagagatatgacatagaatctgatcagtggagtacagtggcaccaatgaatactccccgtggaggagttggctctgttgctctagtaaaccatgtttatgcagtaggtggcaatgatggaatggcttctttatctagcgtggagagatatgatccacatctggataagtggatagaagttaaagaaatgggtcagcgaagagcaggcaatggagttagcaagcttcatggttgcttatacgtagttggtggttttgatgataattctcctctgagttcagttgagcggtatgacccccgaagcaacaagtgggattatgtggcagcacttactactcccagaggtggagtgggaatcgcaacagtgatgggcaaaatctttgcagttggtggtcataatggcaatgcatacttaaatacagtagaagcgtttgatccagtgctgaataggtgggagcttgttggatctgtgtctcactgcagagctggagcaggagtagctgtgtgttcctgtttaactagccaaattcgagatgtaggtcatggatccaataatgtggttgactgtatgtga

SEQ ID NO: 105 - DNA, 11919 bp, Homo sapiens
atggcgcacagctgtcggtggcgcttccccgcccgacccgggaccaccgggggcggcggcggcggggggcgccggggcctagggggcgccccgcggcaacgcgtcccggccctgctgcttccccccgggcccccggtcggcggtggcggccccggggcgcccccctcccccccggctgtggcggccgcggcggcggcggcgggaagcagcggggctggggttccagggggagcggccgccgcctcagcagcctcctcgtcgtccgcctcgtcttcgtcttcgtcatcgtcctcagcctcttcagggccggccctgctccgggtgggcccgggcttcgacgcggcgctgcaggtctcggccgccatcggcaccaacctgcgccggttccgggccgtgtttggggagagcggcgggggaggcggcagcggagaggatgagcaattcttaggttttggctcagatgaagaagtcagagtgcgaagtcccacaaggtctccttcagttaaaactagtcctcgaaaacctcgtgggagacctagaagtggctctgaccgaaattcagctatcctctcagatccatctgtgttttcccctctaaataaatcagagaccaaatctggagataagatcaagaagaaagattctaaaagtatagaaaagaagagaggaagacctcccaccttccctggagtaaaaatcaaaataacacatggaaaggacatttcagagttaccaaagggaaacaaagaagatagcctgaaaaaaattaaaaggacaccttctgctacgtttcagcaagccacaaagattaaaaaattaagagcaggtaaactctctcctctcaagtctaagtttaagacagggaagcttcaaataggaaggaagggggtacaaattgtacgacggagaggaaggcctccatcaacagaaaggataaagaccccttcgggtctcctcattaattctgaactggaaaagccccagaaagtccggaaagacaaggaaggaacacctccacttacaaaagaagataagacagttgtcagacaaagccctcgaaggattaagccagttaggattattccttcttcaaaaaggacagatgcaaccattgctaagcaactcttacagagggcaaaaaagggggctcaaaagaaaattgaaaaagaagcagctcagctgcagggaagaaaggtgaagacacaggtcaaaaatattcgacagttcatcatgcctgttgtcagtgctatctcctcgcggatcattaagacccctcggcggtttatagaggatgaggattatgaccctccaattaaaattgcccgattagagtctacaccgaatagtagattcagtgccccgtcctgtggatcttctgaaaaatcaagtgcagcttctcagcactcctctcaaatgtcttcagactcctctcgatctagtagccccagtgttgatacctccacagactctcaggcttctgaggagattcaggtacttcctgaggagcggagcgatacccctgaagttcatcctccactgcccatttcccagtccccagaaaatgagagtaatgataggagaagcagaaggtattcagtgtcggagagaagttttggatctagaacgacgaaaaaattatcaactctacaaagtgccccccagcagcagacctcctcgtctccacctccacctctgctgactccaccgccaccactgcagccagcctccagtatctctgaccacacaccttggcttatgcctccaacaatccccttagcatcaccatttttgcctgcttccactgctcctatgcaagggaagcgaaaatctattttgcgagaaccgacatttaggtggacttctttaaagcattctaggtcagagccacaatacttttcctcagcaaagtatgccaaagaaggtcttattcgcaaaccaatatttgataatttccgaccccctccactaactcccgaggacgttggctttgcatctggtttttctgcatctggtaccgctgcttcagcccgattgttttcgccactccattctggaacaaggtttgatatgcacaaaaggagccctcttctgagagctccaagatttactccaagtgaggctcactctagaatatttgagtctgtaaccttgcctagtaatcgaacttctgctggaacatcttcttcaggagtatccaatagaaaaaggaaaagaaaagtgtttagtcctattcgatctgaaccaagatctccttctcactccatgaggacaagaagtggaaggcttagtagttctgagctctcacctctcacccccccgtcttctgtctcttcctcgttaagcatttctgttagtcctcttgccactagtgccttaaacccaacttttacttttccttctcattccctgactcagtctggggaatctgcagagaaaaatcagagaccaaggaagcagactagtgctccggcagagccattttcatcaagtagtcctactcctctcttcccttggtttaccccaggctctcagactgaaagagggagaaataaagacaaggcccccgaggagctgtccaaagatcgagatgctgacaagagcgtggagaaggacaagagtagagagagagaccgggagagagaaaaggagaataagcgggagtcaaggaaagagaaaaggaaaaagggatcagaaattcagagtagttctgctttgtatcctgtgggtagggtttccaaagagaaggttgttggtgaagatgttgccacttcatcttctgccaaaaaagcaacagggcggaagaagtcttcatcacatgattctgggactgatattacttctgtgactcttggggatacaacagctgtcaaaaccaaaatacttataaagaaagggagaggaaatctggaaaaaaccaacttggacctcggcccaactgccccatccctggagaaggagaaaaccctctgcctttccactccttcatctagcactgttaaacattccacttcctccataggctccatgttggctcaggcagacaagcttccaatgactgacaagagggttgccagcctcctaaaaaaggccaaagctcagctctgcaagattgagaagagtaagagtcttaaacaaaccgaccagcccaaagcacagggtcaagaaagtgactcatcagagacctctgtgcgaggaccccggattaaacatgtctgcagaagagcagctgttgcccttggccgaaaacgagctgtgtttcctgatgacatgcccaccctgagtgccttaccatgggaagaacgagaaaagattttgtcttccatggggaatgatgacaagtcatcaattgctggctcagaagatgctgaacctcttgctccacccatcaaaccaattaaacctgtcactagaaacaaggcaccccaggaacctccagtaaagaaaggacgtcgatcgaggcggtgtgggcagtgtcccggctgccaggtgcctgaggactgtggtgtttgtactaattgcttagataagcccaagtttggtggtcgcaatataaagaagcagtgctgcaagatgagaaaatgtcagaatctacaatggatgccttccaaagcctacctgcagaagcaagctaaagctgtgaaaaagaaagagaaaaagtctaagaccagtgaaaagaaagacagcaaagagagcagtgttgtgaagaacgtggtggactctagtcagaaacctaccccatcagcaagagaggatcctgccccaaagaaaagcagtagtgagcctcctccacgaaagcccgtcgaggaaaagagtgaagaagggaatgtctcggcccctgggcctgaatccaaacaggccaccactccagcttccaggaagtcaagcaagcaggtctcccagccagcactggtcatcccgcctcagccacctactacaggaccgccaagaaaagaagttcccaaaaccactcctagtgagcccaagaaaaagcagcctccaccaccagaatcaggtccagagcagagcaaacagaaaaaagtggctccccgcccaagtatccctgtaaaacaaaaaccaaaagaaaaggaaaaaccacctccggtcaataagcaggagaatgcaggcactttgaacatcctcagcactctctccaatggcaatagttctaagcaaaaaattccagcagatggagtccacaggatcagagtggactttaaggaggattgtgaagcagaaaatgtgtgggagatgggaggcttaggaatcttgacttctgttcctataacacccagggtggtttgctttctctgtgccagtagtgggcatgtagagtttgtgtattgccaagtctgttgtgagcccttccacaagttttgtttagaggagaacgagcgccctctggaggaccagctggaaaattggtgttgtcgtcgttgcaaattctgtcacgtttgtggaaggcaacatcaggctacaaagcagctgctggagtgtaataagtgccgaaacagctatcaccctgagtgcctgggaccaaactaccccaccaaacccacaaagaagaagaaagtctggatctgtaccaagtgtgttcgctgtaagagctgtggatccacaactccaggcaaagggtgggatgcacagtggtctcatgatttctcactgtgtcatgattgcgccaagctctttgctaaaggaaacttctgccctctctgtgacaaatgttatgatgatgatgactatgagagtaagatgatgcaatgtggaaagtgtgatcgctgggtccattccaaatgtgagaatctttcaggtacagaagatgagatgtatgagattctatctaatctgccagaaagtgtggcctacacttgtgtgaactgtactgagcggcaccctgcagagtggcgactggcccttgaaaaagagctgcagatttctctgaagcaagttctgacagctttgttgaattctcggactaccagccatttgctacgctaccggcaggctgccaagcctccagacttaaatcccgagacagaggagagtataccttcccgcagctcccccgaaggacctgatccaccagttcttactgaggtcagcaaacaggatgatcagcagcctttagatctagaaggagtcaagaggaagatggaccaagggaattacacatctgtgttggagttcagtgatgatattgtgaagatcattcaagcagccattaattcagatggaggacagccagaaattaaaaaagccaacagcatggtcaagtccttcttcattcggcaaatggaacgtgtttttccatggttcagtgtcaaaaagtccaggttttgggagccaaataaagtatcaagcaacagtgggatgttaccaaacgcagtgcttccaccttcacttgaccataattatgctcagtggcaggagcgagaggaaaacagccacactgagcagcctcctttaatgaagaaaatcattccagctcccaaacccaaaggtcctggagaaccagactcaccaactcctctgcatcctcctacaccaccaattttgagtactgataggagtcgagaagacagtccagagctgaacccacccccaggcatagaagacaatagacagtgtgcgttatgtttgacttatggtgatgacagtgctaatgatgctggtcgtttactatatattggccaaaatgagtggacacatgtaaattgtgctttgtggtcagcggaagtgtttgaagatgatgacggatcactaaagaatgtgcatatggctgtgatcaggggcaagcagctgagatgtgaattctgccaaaagccaggagccaccgtgggttgctgtctcacatcctgcaccagcaactatcacttcatgtgttcccgagccaagaactgtgtctttctggatgataaaaaagtatattgccaacgacatcgggatttgatcaaaggcgaagtggttcctgagaatggatttgaagttttcagaagagtgtttgtggactttgaaggaatcagcttgagaaggaagtttctcaatggcttggaaccagaaaatatccacatgatgattgggtctatgacaatcgactgcttaggaattctaaatgatctctccgactgtgaagataagctctttcctattggatatcagtgttccagggtatactggagcaccacagatgctcgcaagcgctgtgtatatacatgcaagatagtggagtgccgtcctccagtcgtagagccggatatcaacagcactgttgaacatgatgaaaacaggaccattgcccatagtccaacatcttttacagaaagttcatcaaaagagagtcaaaacacagctgaaattataagtcctccatcaccagaccgacctcctcattcacaaacctctggctcctgttattatcatgtcatctcaaaggtccccaggattcgaacacccagttattctccaacacagagatcccctggctgtcgaccgttgccttctgcaggaagtcctaccccaaccactcatgaaatagtcacagtaggtgatcctttactctcctctggacttcgaagcattggctccaggcgtcacagtacctcttccttatcaccccagcggtccaaactccggataatgtctccaatgagaactgggaatacttactctaggaataatgtttcctcagtctccaccaccgggaccgctactgatcttgaatcaagtgccaaagtagttgatcatgtcttagggccactgaattcaagtactagtttagggcaaaacacttccacctcttcaaatttgcaaaggacagtggttactgtaggcaataaaaacagtcacttggatggatcttcatcttcagaaatgaagcagtccagtgcttcagacttggtgtccaagagctcctctttaaagggagagaagaccaaagtgctgagttccaagagctcagagggatctgcacataatgtggcttaccctggaattcctaaactggccccacaggttcataacacaacatctagagaactgaatgttagtaaaatcggctcctttgctgaaccctcttcagtgtcgttttcttctaaagaggccctctccttcccacacctccatttgagagggcaaaggaatgatcgagaccaacacacagattctacccaatcagcaaactcctctccagatgaagatactgaagtcaaaaccttgaagctatctggaatgagcaacagatcatccattatcaacgaacatatgggatctagttccagagataggagacagaaagggaaaaaatcctgtaaagaaactttcaaagaaaagcattccagtaaatcttttttggaacctggtcaggtgacaactggtgaggaaggaaacttgaagccagagtttatggatgaggttttgactcctgagtatatgggccaacgaccatgtaacaatgtttcttctgataagattggtgataaaggcctttctatgccaggagtccccaaagctccacccatgcaagtagaaggatctgccaaggaattacaggcaccacggaaacgcacagtcaaagtgacactgacacctctaaaaatggaaaatgagagtcaatccaaaaatgccctgaaagaaagtagtcctgcttcccctttgcaaatagagtcaacatctcccacagaaccaatttcagcctctgaaaatccaggagatggtccagtggcccaaccaagccccaataatacctcatgccaggattctcaaagtaacaactatcagaatcttccagtacaggacagaaacctaatgcttccagatggccccaaacctcaggaggatggctcttttaaaaggaggtatccccgtcgcagtgcccgtgcacgttctaacatgttttttgggcttaccccactctatggagtaagatcctatggtgaagaagacattccattctacagcagctcaactgggaagaagcgaggcaagagatcagctgaaggacaggtggatggggccgatgacttaagcacttcagatgaagacgacttatactattacaacttcactagaacagtgatttcttcaggtggagaggaacgactggcatcccataatttatttcgggaggaggaacagtgtgatcttccaaaaatctcacagttggatggtgttgatgatgggacagagagtgatactagtgtcacagccacaacaaggaaaagcagccagattccaaaaagaaatggtaaagaaaatggaacagagaacttaaagattgatagacctgaagatgctggggagaaagaacatgtcactaagagttctgttggccacaaaaatgagccaaagatggataactgccattctgtaagcagagttaaaacacagggacaagattccttggaagctcagctcagctcattggagtcaagccgcagagtccacacaagtaccccctccgacaaaaatttactggacacctataatactgagctcctgaaatcagattcagacaataacaacagtgatgactgtgggaatatcctgccttcagacattatggactttgtactaaagaatactccatccatgcaggctttgggtgagagcccagagtcatcttcatcagaactcctgaatcttggtgaaggattgggtcttgacagtaatcgtgaaaaagacatgggtctttttgaagtattttctcagcagctgcctacaacagaacctgtggatagtagtgtctcttcctctatctcagcagaggaacagtttgagttgcctctagagctaccatctgatctgtctgtcttgaccacccggagtcccactgtccccagccagaatcccagtagactagctgttatctcagactcaggggagaagagagtaaccatcacagaaaaatctgtagcctcctctgaaagtgacccagcactgctgagcccaggagtagatccaactcctgaaggccacatgactcctgatcattttatccaaggacacatggatgcagaccacatctctagccctccttgtggttcagtagagcaaggtcatggcaacaatcaggatttaactaggaacagtagcacccctggccttcaggtacctgtttccccaactgttcccatccagaaccagaagtatgtgcccaattctactgatagtcctggcccgtctcagatttccaatgcagctgtccagaccactccaccccacctgaagccagccactgagaaactcatagttgttaaccagaacatgcagccactttatgttctccaaactcttccaaatggagtgacccaaaaaatccaattgacctcttctgttagttctacacccagtgtgatggagacaaatacttcagtattgggacccatgggaggtggtctcacccttaccacaggactaaatccaagcttgccaacttctcaatctttgttcccttctgctagcaaaggattgctacccatgtctcatcaccagcacttacattccttccctgcagctactcaaagtagtttcccaccaaacatcagcaatcctccttcaggcctgcttattggggttcagcctcctccggatccccaacttttggtttcagaatccagccagaggacagacctcagtaccacagtagccactccatcctctggactcaagaaaagacccatatctcgtctacagacccgaaagaataaaaaacttgctccctctagtaccccttcaaacattgccccttctgatgtggtttctaatatgacattgattaacttcacaccctcccagcttcctaatcatccaagtctgttagatttggggtcacttaatacttcatctcaccgaactgtccccaacatcataaaaagatctaaatctagcatcatgtattttgaaccggcacccctgttaccacagagtgtgggaggaactgctgccacagcggcaggcacatcaacaataagccaggatactagccacctcacatcagggtctgtgtctggcttggcatccagttcctctgtcttgaatgttgtatccatgcaaactaccacaacccctacaagtagtgcgtcagttccaggacacgtcaccttaaccaacccaaggttgcttggtaccccagatattggctcaataagcaatcttttaatcaaagctagccagcagagcctggggattcaggaccagcctgtggctttaccgccaagttcaggaatgtttccacaactggggacatcacagaccccctctactgctgcaataacagcggcatctagcatctgtgtgctcccctccactcagactacgggcataacagccgcttcaccttctggggaagcagacgaacactatcagcttcagcatgtgaaccagctccttgccagcaaaactgggattcattcttcccagcgtgatcttgattctgcttcagggccccaggtatccaactttacccagacggtagacgctcctaatagcatgggactggagcagaacaaggctttatcctcagctgtgcaagccagccccacctctcctgggggttctccatcctctccatcttctggacagcggtcagcaagcccttcagtgccgggtcccactaaacccaaaccaaaaaccaaacggtttcagctgcctctagacaaagggaatggcaagaagcacaaagtttcccatttgcggaccagttcttctgaagcacacattccagaccaagaaacgacatccctgacctcaggcacagggactccaggagcagaggctgagcagcaggatacagctagcgtggagcagtcctcccagaaggagtgtgggcaacctgcagggcaagtcgctgttcttccggaagttcaggtgacccaaaatccagcaaatgaacaagaaagtgcagaacctaaaacagtggaagaagaggaaagtaatttcagctccccactgatgctttggcttcagcaagaacaaaagcggaaggaaagcattactgagaaaaaacccaagaaaggacttgtttttgaaatttccagtgatgatggctttcagatctgtgcagaaagtattgaagatgcctggaagtcattgacagataaagtccaggaagctcgatcaaatgcccgcctaaagcagctctcatttgcaggtgttaacggtttgaggatgctggggattctccatgatgcagttgtgttcctcattgagcagctgtctggtgccaagcactgtcgaaattacaaattccgtttccacaagccagaggaggccaatgaaccccccttgaaccctcacggctcagccagggctgaagtccacctcaggaagtcagcatttgacatgtttaacttcctggcttctaaacatcgtcagcctcctgaatacaaccccaatgatgaagaagaggaggaggtacagctgaagtcagctcggagggcaactagcatggatctgccaatgcccatgcgcttccggcacttaaaaaagacttctaaggaggcagttggtgtctacaggtctcccatccatggccggggtcttttctgtaagagaaacattgatgcaggtgagatggtgattgagtatgccggcaacgtcatccgctccatccagactgacaagcgggaaaagtattacgacagcaagggcattggttgctatatgttccgaattgatgactcagaggtagtggatgccaccatgcatggaaatgctgcacgcttcatcaatcactcgtgtgagcctaactgctattctcgggtcatcaatattgatgggcagaagcacattgtcatctttgccatgcgtaagatctaccgaggagaggaactcacttacgactataagttccccattgaggatgccagcaacaagctgccctgcaactgtggcgccaagaaatgccggaagttcctaaactaa

SEQ ID NO: 106 - DNA, 8148 bp, Homo sapiens
atggcggcggcggcgggcggcggcagttgccccgggcctggctccgcgcggggccgcttcccgggccggccgcggggcgccggcgggggcgggggccgcggcggacggggcaacggggccgaaagagtgcgggtagctctgcggcgcggcggtggcgcgacggggccgggcggagccgagcccggggaggacacggccctgctccgtttgctggggctccgccggggcctgcgccggctccgccgcctgtgggccggcccgcgggtccagcggggccggggacggggtcggggccggggctggggcccgagtcgaggctgcgtgccggaggaggagagcagtgacggggaatccgacgaggaggagtttcagggttttcattcagatgaagatgtggcccccagttccctgcgctctgcgctccgatcccagcgaggtcgagcgccccgaggtcggggtcgcaagcataagacgaccccccttcctcctcctcgcctagcagatgtggctcctacccccccaaagacccctgcccggaaacggggtgaggaaggcacagaacggatggtgcaggcactgactgaacttctccggcgggcccaggcaccccaagcaccccggagccgggcatgtgagccctccaccccccggcggtctcggggacggcccccaggacggccagcaggcccctgcaggaggaagcagcaagcagtagtggtggcagaagcagctgtgacaatccccaaacctgagcccccacctcctgtggttccagtgaaacatcagactggcagctggaaatgcaaggaggggcccggtccaggacctgggacccccaggcgtggaggacagtcaagccgtggaggccgtggaggcaggggccgcggccgaggtggtgggctcccctttgtgatcaagtttgtttcaagggccaaaaaagtaaagatgggacaattgtccttgggactcgaatcaggtcaaggtcaaggtcaacatgaggaaagttggcaggatgtcccccaaagaagagttggatctggacagggagggagcccttgctggaaaaagcaggaacagaagctggatgacgaggaagaagagaagaaagaagaagaagaaaaagacaaggagggagaagagaaggaagaaagagctgtagctgaggagatgatgccagctgcggaaaaggaagaggcaaagctgccaccaccgcctctgactcctccagccccttcacctcctccacccctcccacccccttcgacatctcctccacccccactctgccctccaccaccacccccagtgtccccaccacctctaccatcccctccaccgcctcctgcccaagaggagcaggaggaatcccctcctcctgtggtcccagctacgtgctccaggaagaggggccggcctcccctgactcccagccagcgggcggagcgggaagctgctcgggcagggccagagggcacctctcctcccactccaacccccagcaccgccacgggaggccctccggaagacagtcccaccgtggcccccaaaagcaccaccttcctgaagaatatccggcagtttattatgcctgtggtgagtgcccgctcctcccgtgtcatcaagacaccccggcgatttatggatgaagacccccccaaacccccaaaggtggaggtctcacctgtcctgcgacctcccattaccacctccccacctgttccccaggagccagcaccagtcccctctccaccacgtgccccaactcctccatctaccccagttccactccctgagaagagacggtccatcctaagggaacccacatttcgctggacctcactgacccgggagctgccccctcctcccccagcccctccacctcccccggccccctccccaccccctgctcctgccacctcctcccggaggcccctactccttcgggcccctcagtttaccccaagcgaagcccacctgaagatctacgaatcggtgcttactcctcctcctcttggggctcctgaagcccctgagccagagcctcctcctgccgatgactctccagctgagcctgagcctcgggcagtgggccgcaccaaccacctcagcctgcctcgattcgcccctgtggtcaccactcctgttaaggccgaggtgtcccctcacggggctccagctctgagcaacgggccacagacacaggctcagctactgcagcccctgcaggccttgcaaacccagctcctgccccaggcactaccgccaccacagccacagctgcagccaccgccgtcaccacagcagatgcctcccctggaaaaagcccggattgcgggcgtgggttccttgccgctgtctggggtagaggagaagatgttcagcctcctcaagagagccaaagtgcagctattcaagatcgatcagcagcagcagcagaaggtggcagcttccatgccgctgagccctggagggcagatggaggaggtggccggggctgtcaagcagatctccgacagaggccctgtccggtctgaagatgagtcggtggaagctaagagagagcggccctcaggtcccgagtcccctgtgcaaggtccccgcatcaaacatgtctgccgtcatgctgctgtggccctgggtcaggcccgggccatggtgcctgaagatgtccctcgcctcagtgccctccctctccgggatcggcaggacctcgccacagaggatacatcatcggcgtccgagactgagagtgtcccgtcacggtcccggcggggaaaggtggaggcagcaggccctgggggagaatcagagcccacaggttctggagggaccctggcccacacaccccggcgctcactgccctcccatcacggcaagaagatgcgcatggctcgatgtggacactgtcggggctgcctacgtgtgcaggactgtgggtcctgtgtcaactgcctagacaagcccaagtttgggggccctaacaccaagaagcagtgctgtgtataccggaagtgtgacaaaatagaggctcggaagatggaacgactggctaaaaaaggccggacgatagtgaagacgctgttgccctgggattccgatgaatctcctgaggcctcccctggtcctccaggcccacgccggggggcgggagctggggggccccgggaggaggtggtggcccacccagggcccgaggagcaggactccctcctgcagcgcaagtcagctcggcgctgcgtcaaacagcgaccctcctatgatatcttcgaggattcggatgactcggagcccgggggcccccctgctcctcggcgtcggaccccccgagaaaatgagctgccactgccagaacctgaggagcagagccggccccgcaaacctaccctgcagcctgtgttgcagctcaaggcccgaaggcgcctggacaaggatgctttggcccctggcccctttgcttcttttcccaatggctggactggaaagcagaagtctcccgatggtgtgcaccgcgtccgtgtggattttaaggaggattgtgatttagagaacgtgtggctgatggggggcctgagtgtgctcacctctgtgccagggggccccccgatggtgtgcttgctgtgtgccagcaaaggactccacgagctggtgttctgtcaagtctgctgtgacccattccacccattctgcctggaggaggccgagcggcccctgccccagcatcacgacacctggtgctgccgtcgctgcaaattctgccacgtctgtggacgcaaaggtcgtggatccaagcacctcctggagtgcgagcgctgccgccatgcataccacccggcctgtctggggcccagctatccaacccgggccacgcgcaaacggcgccactggatctgttcagcctgtgtgcgctgtaagagctgtggggcaactccaggcaagaactgggacgtcgagtggtctggagattacagcctctgccccaggtgcacccagctatatgagaaaggaaactactgcccgatctgtacacgctgctatgaagacaacgactatgagagcaagatgatgcagtgcgcacagtgcgatcactgggtgcatgccaagtgcgaggggctctcagatgaagactacgagatcctttcaggactgccagactcggtgctgtacacctgcggaccgtgtgctggggcagcgcagccccgctggcgagaggccctgagcggggccctccaggggggcctgcgccaggtgctccagggcctgctgagctccaaggtggtgggcccactgctgctctgcacccagtgtgggccagatgggaagcaactgcacccaggaccctgcggcctgcaagctgtgagtcagcgcttcgaggatggccactacaagtctgtgcacagcttcatggaggacatggtgggcatcctcatgcggcactcggaggagggagagaccccggaccgccgggctggaggccagatgaaggggctcctgctgaagctgctagaatctgcgttcggctggttcgacgcccacgaccccaagtactggcgacggagtacccggctgccaaacggagtccttcccaatgcggtgttgcccccatccctggatcatgtctatgcgcagtggagacagcaggaaccagagaccccagaatcagggcagcctccaggggatccctcagcagcattccagggcaaggatccggctgccttctcacacctggaggacccccgtcagtgtgcactctgcctcaaatacggggatgcagactccaaggaggcggggcggctcttgtacatcgggcagaacgagtggacacacgtcaactgtgccatctggtcggcggaagtcttcgaggagaacgacggctccctcaagaatgtgcatgctgctgtggcccgagggaggcagatgcgctgcgagctctgcctgaagcctggcgccacggtgggctgctgcctgtcctcctgcctcagcaacttccacttcatgtgtgcccgggccagctactgcatcttccaggatgacaagaaagtcttctgccagaaacacactgatctcctggatggcaaggaaattgtgaaccccgatggttttgatgttctccgccgagtctatgtggacttcgagggcatcaacttcaagcggaagttcttgacggggcttgaacccgatgccatcaacgtgctcattggttccatccgcattgactccctgggtactctgtctgatctctcggactgcgagggacggctcttccccattggctaccagtgctcccgtctgtactggagcacagtggatgctcggaggcgctgctggtatcggtgccgaattctggagtatcggccatgggggccgagggaagagccagctcacctggaggctgcagaggagaaccagaccattgtgcacagccccgccccttcctcagagcccccaggtggtgaggaccccccactggacacagatgttcttgtccctggagctcctgagcgccactcgcccattcagaacctggaccctccactgcggccagattcaggcagcgcccctcctccagccccccgttctttttcgggggctcgaatcaaagtgcccaactactcgccatcccggaggcccttggggggtgtctcctttggccccctgccctcccctggaagtccatcttcactgacccaccacatccccacagtgggagacccggacttcccagctccccccagacgttcccgtcgtcccagccctttggctcccaggccgcctccatcacggtgggcctcccctcctctaaaaacctcccctcagctcagggtgccccctcctacctcagtcgtcacagccctcacacctacctcaggggagctggctccccctggcccggccccatctccaccaccccctgaagacctgggcccagacttcgaggacatggaggtggtgtcaggactgagtgctgctgacctggacttcgcggccagcctgctggggactgagcccttccaggaagagattgtagccgctggggccatggggagcagccacgggggcccgggggacagctccgaggaggagtccagccccacctcccgctacatccacttccctgtgactgtggtgtccgcccctggtctggcccccagcgctacccctggagccccccgcattgaacagctggacggcgtggacgacggcactgacagtgaggctgaggcggtgcagcagcctcggggccagggcacgcctccttcggggccaggagtagtccgggcaggggtccttggggctgcaggggacagggcccggcctcctgaggacctgccatcggaaattgtggattttgtgttgaagaacctagggggtcctggggatggaggtgctggccctagagaggagtcactccccccggcgcctcccctggctaatggcagccagccctcccaaggcctgaccgccagcccagctgaccccacccgcacatttgcctggctcccaggggccccaggggtccgggtgttaagccttggccctgcccctgagccccccaaacccgccacatccaaaatcatacttgtcaacaagctggggcaagtatttgtgaagatggctggggagggtgaacctgtcccacccccagtgaagcagccacctttgccccccaccatttcccccacggctcccacctcctggactctgcccccaggccccctcctcggcgtgctgcccgtggtcggagtggtccgccctgccccgcccccgccaccccctcccctgacgctggtgctgagcagtgggccagccagcccgccccgccaggccatccgcgtcaagagggtgtccactttctccggccggtccccgccagcacctcccccatacaaagccccccggctggatgaagatggagaggcctcagaggatacccctcaggttccagggcttggcagtggcgggtttagccgtgtgaggatgaaaacccccacagtgcgtggggtccttgacctggatcggcctggggagcccgctggggaagaaagtcctgggcccctccaggaacggtcccctttgctgccacttccggaagatggtcctccccaggtccccgatggtcccccagacctgctgcttgagtcccagtggcaccactattcaggtgaggcttcgagctctgaggaagagcctccatccccagatgataaagagaaccaggccccaaaacggactggcccacatctgcgcttcgagatcagcagtgaggatgggttcagcgttgaggcagagagcttggagggggcgtggagaactctgatcgagaaagtgcaagaggcccgagggcatgcccgactcagacatctctcctttagtggaatgagtggggcgagactcctgggcatccaccatgatgctgtcatcttcctggccgagcagctccccggagcccagcgttgccagcactataagttccgttaccaccagcagggagagggccaggaggagccgcccctgaatccccatggggctgctcgggcagaggtctatctccggaagtgcacctttgacatgttcaacttcctggcctcccagcaccgggtgctccctgagggggccacctgtgatgaggaagaggatgaggtgcagctcaggtcaaccagacgtgccaccagcctggagctgcccatggccatgcgttttcgtcaccttaagaagacgtccaaagaagctgtgggtgtctacagatcagccatccacgggcgaggcctgttctgtaagcgcaacatcgacgcgggggagatggtcatcgagtactctggcattgtcatccgctcggtgttgactgacaagcgggagaagttctacgatgggaagggcatcgggtgctatatgttccgcatggatgactttgatgtagtggacgccacgatgcatggcaatgccgcccgcttcatcaaccactcctgtgagcccaactgcttctctcgggtcatccacgtggagggccagaaacacattgttatcttcgccctgcgccgcatcctgcgtggtgaggagctcacctacgactacaagttccccatcgaggatgccagcaacaagctgccctgcaactgtggcgccaagcgctgccgtcggttccttaactga

SEQ ID NO: 107 - DNA, 14736 bp, Homo sapiens
atgtcgtcggaggaggacaagagcgtggagcagccgcagccgccgccaccaccccccgaggagcctggagccccggccccgagccccgcagccgcagacaaaagacctcggggccggcctcgcaaagatggcgcttcccctttccagagagccagaaagaaacctcgaagtagggggaaaactgcagtggaagatgaggacagcatggatgggctggagacaacagaaacagaaacgattgtggaaacagaaatcaaagaacaatctgcagaagaggatgctgaagcagaagtggataacagcaaacagctaattccaactcttcagcgatctgtgtctgaggaatcggcaaactccctggtctctgttggtgtagaagccaaaatcagtgaacagctctgcgctttttgttactgtggggaaaaaagttccttaggacaaggagacttaaaacaattcagaataacgcctggatttatcttgccatggagaaaccaaccttctaacaagaaggacattgatgacaacagcaatggaacctatgagaaaatgcaaaactcagcaccacgaaaacaaagaggacagagaaaagaacgatctcctcagcagaatatagtatcttgtgtaagtgtaagcacccagacagcttcagatgatcaagctggtaaactgtgggatgaactcagtctggttgggcttccagatgccattgatatccaagccttatttgattctacaggcacttgttgggctcatcaccgttgtgtggagtggtcactaggagtatgccagatggaagaaccattgttagtgaacgtggacaaagctgttgtctcagggagcacagaacgatgtgcattttgtaagcaccttggagccactatcaaatgctgtgaagagaaatgtacccagatgtatcattatccttgtgctgcaggagccggcacctttcaggatttcagtcacatcttcctgctttgtccagaacacattgaccaagctcctgaaagatcgaaggaagatgcaaactgtgcagtgtgcgacagcccgggagacctcttagatcagttcttttgtactacttgtggtcagcactatcatggaatgtgcctggatatagcggttactccattaaaacgtgcaggttggcaatgtcctgagtgcaaagtgtgccagaactgcaaacaatcgggagaagatagcaagatgctagtgtgtgatacgtgtgacaaagggtatcatactttttgtcttcaaccagttatgaaatcagtaccaaccaatggctggaaatgcaaaaattgcagaatatgtatagagtgtggcacacggtctagttctcagtggcaccacaattgcctgatatgtgacaattgttaccaacagcaggataacttatgtcccttctgtgggaagtgttatcatccagaattgcagaaagacatgcttcattgtaatatgtgcaaaaggtgggttcacctagagtgtgacaaaccaacagatcatgaactggatactcagctcaaagaagagtatatctgcatgtattgtaaacacctgggagctgagatggatcgtttacagccaggtgaggaagtggagatagctgagctcactacagattataacaatgaaatggaagttgaaggccctgaagatcaaatggtattctcagagcaggcagctaataaagatgtcaacggtcaggagtccactcctggaattgttccagatgcggttcaagtccacactgaagagcaacagaagagtcatccctcagaaagtcttgacacagatagtcttcttattgctgtatcatcccaacatacagtgaatactgaattggaaaaacagatttctaatgaagttgatagtgaagacctgaaaatgtcttctgaagtgaagcatatttgtggcgaagatcaaattgaagataaaatggaagtgacagaaaacattgaagtcgttacacaccagatcactgtgcagcaagaacaactgcagttgttagaggaacctgaaacagtggtatccagagaagaatcaaggcctccaaaattagtcatggaatctgtcactcttccactagaaaccttagtgtccccacatgaggaaagtatttcattatgtcctgaggaacagttggttatagaaaggctacaaggagaaaaggaacagaaagaaaattctgaactttctactggattgatggactctgaaatgactcctacaattgagggttgtgtgaaagatgtttcataccaaggaggcaaatctataaagttatcatctgagacagagtcatcattttcatcatcagcagacataagcaaggcagatgtgtcttcctccccaacaccttcttcagacttgccttcgcatgacatgctgcataattacccttcagctcttagttcctctgctggaaacatcatgccaacaacttacatctcagtcactccaaaaattggcatgggtaaaccagctattactaagagaaaattttctcctggtagacctcggtccaaacagggggcttggagtacccataatacagtgagcccaccttcctggtccccagacatttcagaaggtcgggaaatttttaaacccaggcagcttcctggcagtgccatttggagcatcaaagtgggccgtgggtctggatttccaggaaagcggagacctcgaggtgcaggactgtcggggcgaggtggccgaggcaggtcaaagctgaaaagtggaatcggagctgttgtattacctggggtgtctactgcagatatttcatcaaataaggatgatgaagaaaactctatgcacaatacagttgtgttgttttctagcagtgacaagttcactttgaatcaggatatgtgtgtagtttgtggcagttttggccaaggagcagaaggaagattacttgcctgttctcagtgtggtcagtgttaccatccatactgtgtcagtattaagatcactaaagtggttcttagcaaaggttggaggtgtcttgagtgcactgtgtgtgaggcctgtgggaaggcaactgacccaggaagactcctgctgtgtgatgactgtgacataagttatcacacctactgcctagaccctccattgcagacagttcccaaaggaggctggaagtgcaaatggtgtgtttggtgcagacactgtggagcaacatctgcaggtctaagatgtgaatggcagaacaattacacacagtgcgctccttgtgcaagcttatcttcctgtccagtctgctatcgaaactatagagaagaagatcttattctgcaatgtagacaatgtgatagatggatgcatgcagtttgtcagaacttaaatactgaggaagaagtggaaaatgtagcagacattggttttgattgtagcatgtgcagaccctatatgcctgcgtctaatgtgccttcctcagactgctgtgaatcttcacttgtagcacaaattgtcacaaaagtaaaagagctagacccacccaagacttatacccaggatggtgtgtgtttgactgaatcagggatgactcagttacagagcctcacagttacagttccaagaagaaaacggtcaaaaccaaaattgaaattgaagattataaatcagaatagcgtggccgtccttcagacccctccagacatccaatcagagcattcaagggatggtgaaatggatgatagtcgagaaggagaacttatggattgtgatggaaaatcagaatctagtcctgagcgggaagctgtggatgatgaaactaagggagtggaaggaacagatggtgtcaaaaagagaaaaaggaaaccatacagaccaggtattggtggatttatggtgcggcaaagaagtcgaactgggcaagggaaaaccaaaagatctgtgatcagaaaagattcctcaggctctatttccgagcagttaccttgcagagatgatggctggagtgagcagttaccagatactttagttgatgaatctgtttctgttactgaaagcactgaaaaaataaagaagagataccgaaaaaggaaaaataagcttgaagaaactttccctgcctatttacaagaagctttctttggaaaagatcttctagatacaagtagacaaagcaagataagtttagataatctgtcagaagatggagctcagcttttatataaaacaaacatgaacacaggtttcttggatccttccttagatccactacttagttcatcctcggctccaacaaaatctggaactcacggtcctgctgatgacccattagctgatatttctgaagttttaaacacagatgatgacattcttggaataatttcagatgatctagcaaaatcagttgatcattcagatattggtcctgtcactgatgatccttcctctttgcctcagccaaatgtcaatcagagttcacgaccattaagtgaagaacagctagatgggatcctcagtcctgaactagacaaaatggtcacagatggagcaattcttggaaaattatataaaattccagagcttggcggaaaagatgttgaagacttatttacagctgtacttagtcctgcgaacactcagccaactccattgccacagcctcccccaccaacacagctgttgccaatacacaatcaggatgctttttcacggatgcctctcatgaatggccttattggatccagtcctcatctcccacataattctttgccacctggaagcggactgggaactttctctgcaattgcacaatcctcttatcctgatgccagggataaaaattcagcctttaatccaatggcaagtgatcctaacaactcttggacatcatcagctcccactgtggaaggagaaaatgacacaatgtcgaatgcccagagaagcacgcttaagtgggagaaagaggaggctctgggtgaaatggcaactgttgccccagttctctacaccaatattaatttccccaacttaaaggaagaattccctgattggactactagagtgaagcaaattgccaaattgtggagaaaagcaagctcacaagaaagagcaccatatgtgcaaaaagccagagataacagagctgctttacgcattaataaagtacagatgtcaaatgattccatgaaaaggcagcaacagcaagatagcattgatcccagctctcgtattgattcggagctttttaaagatcctttaaagcaaagagaatcagaacatgaacaggaatggaaatttagacagcaaatgcgtcagaaaagtaagcagcaagctaaaattgaagccacacagaaacttgaacaggtgaaaaatgagcagcagcagcagcaacaacagcaatttggttctcagcatcttctggtgcagtctggttcagatacaccaagtagtgggatacagagtcccttgacacctcagcctggcaatggaaatatgtctcctgcacagtcattccataaagaactgtttacaaaacagccacccagtacccctacgtctacatcttcagatgatgtgtttgtaaagccacaagctccacctcctcctccagccccatcccggattcccatccaggatagtctttctcaggctcagacttctcagccaccctcaccgcaagtgttttcacctgggtcctctaactcacgaccaccatctccaatggatccatatgcaaaaatggttggtacccctcgaccacctcctgtgggccatagtttttccagaagaaattctgctgcaccagtggaaaactgtacacctttatcatcggtatctaggccccttcaaatgaatgagacaacagcaaataggccatcccctgtcagagatttatgttcttcttccacgacaaataatgacccctatgcaaaacctccagacacacctaggcctgtgatgacagatcaatttcccaaatccttgggcctatcccggtctcctgtagtttcagaacaaactgcaaaaggccctatagcagctggaaccagtgatcactttactaaaccatctcctagggcagatgtgtttcaaagacaaaggatacctgactcatatgcacgacccttgttgacacctgcacctcttgatagtggtcctggaccttttaagactccaatgcaacctcctccatcctctcaggatccttatggatcagtgtcacaggcatcaaggcgattgtctgttgacccttatgaaaggcctgctttgacaccaagacctatagataatttttctcataatcagtcaaatgatccatatagtcagcctccccttaccccacatccagcagtgaatgaatcttttgcccatccttcaagggctttttcccagcctggaaccatatcaaggccaacatctcaggacccatactcccaacccccaggaactccacgacctgttgtagattcttattcccaatcttcaggaacagctaggtccaatacagacccttactctcaacctcctggaactccccggcctactactgttgacccatatagtcagcagccccaaaccccaagaccatctacacaaactgacttgtttgttacacctgtaacaaatcagaggcattctgatccatatgctcatcctcctggaacaccaagacctggaatttctgtcccttactctcagccaccagcaacaccaaggccaaggatttcagagggttttactaggtcctcaatgacaagaccagtcctcatgccaaatcaggatcctttcctgcaagcagcacaaaaccgaggaccagctttacctggcccgttggtaaggccacctgatacatgttcccagacacctaggccccctggacctggtctttcagacacatttagccgtgtttccccatctgctgcccgtgatccctatgatcagtctccaatgactccaagatctcagtctgactcttttggaacaagtcaaactgcccatgatgttgctgatcagccaaggcctggatcagaggggagcttctgtgcatcttcaaactctccaatgcactcccaaggccagcagttctctggtgtctcccaacttcctggacctgtgccaacttcaggagtaactgatacacagaatactgtaaatatggcccaagcagatacagagaaattgagacagcggcagaagttacgtgaaatcattctccagcagcaacagcagaagaagattgcaggtcgacaggagaaggggtcacaggactcacccgcagtgcctcatccagggcctcttcaacactggcaaccagagaatgttaaccaggctttcaccagacccccacctccctatcctgggaacattaggtctcctgttgcccctcctttaggacctagatatgctgttttcccaaaagatcagcgtggaccctatcctcctgatgttgctagtatggggatgagacctcatggatttagatttggatttccaggaggtagtcatggtaccatgccgagtcaagagcgcttccttgtgcctcctcagcaaatacagggatctggagtttctccacagctaagaagatcagtatctgtagatatgcctaggcctttaaataactcacaaatgaataatccagttggacttcctcagcatttttcaccacagagcttgccagttcagcagcacaacatactgggccaagcatatattgaactgagacatagggctcctgacggaaggcaacggctgcctttcagtgctccacctggcagcgttgtagaggcatcttctaatctgagacatggaaacttcattccccggccagactttccgggccctagacacacagaccccatgcgacgacctccccagggtctacctaatcagctacctgtgcacccagatttggaacaagtgccaccatctcaacaagagcaaggtcattctgtccattcatcttctatggtcatgaggactctgaaccatccactaggtggtgaattttcagaagctcctttgtcaacatctgtaccgtctgaaacaacgtctgataatttacagataaccacccagccttctgatggtctagaggaaaaacttgattctgatgacccttctgtgaaggaactggatgttaaagaccttgagggggttgaagtcaaagacttagatgatgaagatcttgaaaacttaaatttagatacagaggatggcaaggtagttgaattggatactttagataatttggaaactaatgatcccaacctggatgacctcttaaggtcaggagagtttgatatcattgcatatacagatccagaacttgacatgggagataagaaaagcatgtttaatgaggaactagaccttccaattgatgataagttagataatcagtgtgtatctgttgaaccaaaaaaaaaggaacaagaaaacaaaactctggttctctctgataaacattcaccacagaaaaaatccactgttaccaatgaggtaaaaacggaagtactgtctccaaattctaaggtggaatccaaatgtgaaactgaaaaaaatgatgagaataaagataatgttgacactccttgctcacaggcttctgctcactcagacctaaatgatggagaaaagacttctttgcatccttgtgatccagatctatttgagaaaagaaccaatcgagaaactgctggccccagtgcaaatgtcattcaggcatccactcaactacctgctcaagatgtaataaactcttgtggcataactggatcaactccagttctctcaagtttacttgctaatgagaaatctgataattcagacattaggccatcggggtctccaccaccaccaactctgccggcctccccatccaatcatgtgtcaagtttgcctcctttcatagcaccgcctggccgtgttttggataatgccatgaattctaatgtgacagtagtctctagggtaaaccatgttttttctcagggtgtgcaggtaaacccagggctcattccaggtcaatcaacagttaaccacagtctggggacaggaaaacctgcaactcaaactgggcctcaaacaagtcagtctggtaccagtagcatgtctggaccccaacagctaatgattcctcaaacattagcacagcagaatagagagaggccccttcttctagaagaacagcctctacttctacaggatcttttggatcaagaaaggcaagaacagcagcagcaaagacagatgcaagccatgattcgtcagcgatcagaaccgttcttccctaatattgattttgatgcaattacagatcctataatgaaagccaaaatggtggcccttaaaggtataaataaagtgatggcacaaaacaatctgggcatgccaccaatggtgatgagcaggttcccttttatgggccaggtggtaactggaacacagaacagtgaaggacagaaccttggaccacaggccattcctcaggatggcagtataacacatcagatttctaggcctaatcctccaaattttggtccaggctttgtcaatgattcacagcgtaagcagtatgaagagtggctccaggagacccaacagctgcttcaaatgcagcagaagtatcttgaagaacaaattggtgctcacagaaaatctaagaaggccctttcagctaaacaacgtactgccaagaaagctgggcgtgaatttccagaggaagatgcagaacaactcaagcatgttactgaacagcaaagcatggttcagaaacagctagaacagattcgtaaacaacagaaagaacatgctgaattgattgaagattatcggatcaaacagcagcagcaatgtgcaatggccccacctaccatgatgcccagtgtccagccccagccacccctaattccaggtgccactccacccaccatgagccaacccacctttcccatggtgccacagcagcttcagcaccagcagcacacaacagttatttctggccatactagccctgttagaatgcccagtttacctggatggcaacccaacagtgctcctgcccacctgcccctcaatcctcctagaattcagcccccaattgcccagttaccaataaaaacttgtacaccagccccagggacagtctcaaatgcaaatccacagagtggaccaccacctcgggtagaatttgatgacaacaatccctttagtgaaagttttcaagaacgggaacgtaaggaacgtttacgagaacagcaagagagacaacggatccaactcatgcaggaggtagatagacaaagagctttgcagcagaggatggaaatggagcagcatggtatggtgggctctgagataagtagtagtaggacatctgtgtcccagattcccttctacagttccgacttaccttgtgattttatgcaacctctaggaccccttcagcagtctccacaacaccaacagcaaatggggcaggttttacagcagcagaatatacaacaaggatcaattaattcaccctccacccaaactttcatgcagactaatgagcgaaggcaggtaggccctccttcatttgttcctgattcaccatcaatccctgttggaagcccaaatttttcttctgtgaagcagggacatggaaatctttctgggaccagcttccagcagtccccagtgaggccttcttttacacctgctttaccagcagcacctccagtagctaatagcagtctcccatgtggccaagattctactataacccatggacacagttatccgggatcaacccaatcgctcattcagttgtattctgatataatcccagaggaaaaagggaaaaagaaaagaacaagaaagaagaaaagagatgatgatgcagaatccaccaaggctccatcaactccccattcagatataactgccccaccgactccaggcatctcagaaactacctctactcctgcagtgagcacacccagtgagcttcctcaacaagccgaccaagagtcggtggaaccagtcggcccatccactcccaatatggcagcaggccagctatgtacagaattagagaacaaactgcccaatagtgatttctcacaagcaactccaaatcaacagacgtatgcaaattcagaagtagacaagctctccatggaaacccctgccaaaacagaagagataaaactggaaaaggctgagacagagtcctgcccaggccaagaggagcctaaattggaggaacagaatggtagtaaggtagaaggaaacgctgtagcctgtcctgtctcctcagcacagagtcctccccattctgctggggcccctgctgccaaaggagactcagggaatgaacttctgaaacacttgttgaaaaataaaaagtcatcttctcttttgaatcaaaaacctgagggcagtatttgttcagaagatgactgtacaaaggataataaactagttgagaagcagaacccagctgaaggactgcaaactttgggggctcaaatgcaaggtggttttggatgtggcaaccagttgccaaaaacagatggaggaagtgaaaccaagaaacagcgaagcaaacggactcagaggacgggtgagaaagcagcacctcgctcaaagaaaaggaaaaaggacgaagaggagaaacaagctatgtactctagcactgacacgtttacccacttgaaacagcagaataatttaagtaatcctccaacaccccctgcctctcttcctcctacaccacctcctatggcttgtcagaagatggccaatggttttgcaacaactgaagaacttgctggaaaagccggagtgttagtgagccatgaagttaccaaaactctaggacctaaaccatttcagctgcccttcagaccccaggacgacttgttggcccgagctcttgctcagggccccaagacagttgatgtgccagcctccctcccaacaccacctcataacaatcaggaagaattaaggatacaggatcactgtggtgatcgagatactcctgacagttttgttccctcatcctctcctgagagtgtggttggggtagaagtgagcaggtatccagatctgtcattggtcaaggaggagcctccagaaccggtgccgtcccccatcattccaattcttcctagcactgctgggaaaagttcagaatcaagaaggaatgacatcaaaactgagccaggcactttatattttgcgtcaccttttggtccttccccaaatggtcccagatcaggtcttatatctgtagcaattactctgcatcctacagctgctgagaacattagcagtgttgtggctgcattttccgaccttcttcacgtccgaatccctaacagctatgaggttagcagtgctccagatgtcccatccatgggtttggtcagtagccacagaatcaacccgggtttggagtatcgacagcatttacttctccgtgggcctccgccaggatctgcaaaccctcccagattagtgagctcttaccggctgaagcagcctaatgtaccatttcctccaacaagcaatggtctttctggatataaggattctagtcatggtattgcagaaagcgcagcactcagaccacagtggtgttgtcattgtaaagtggttattcttggaagtggtgtgcggaaatctttcaaagatctgacccttttgaacaaggattcccgagaaagcaccaagagggtagagaaggacattgtcttctgtagtaataactgctttattctttattcatcaactgcacaagcgaaaaactcagaaaacaaggaatccattccttcattgccacaatcacctatgagagaaacgccttccaaagcatttcatcagtacagcaacaacatctccactttggatgtgcactgtctcccccagctcccagagaaagcttctccccctgcctcaccacccatcgccttccctcctgcttttgaagcagcccaagtcgaggccaagccagatgagctgaaggtgacagtcaagctgaagcctcggctaagagctgtccatggtgggtttgaagattgcaggccgctcaataaaaaatggagaggaatgaaatggaagaagtggagcattcatattgtaatccctaaggggacatttaaaccaccttgtgaggatgaaatagatgaatttctaaagaaattgggcacttcccttaaacctgatcctgtgcccaaagactatcggaaatgttgcttttgtcatgaagaaggtgatggattgacagatggaccagcaaggctactcaaccttgacttggatctgtgggtccacttgaactgcgctctgtggtccacggaggtctatgagactcaggctggtgccttaataaatgtggagctagctctgaggagaggcctacaaatgaaatgtgtcttctgtcacaagacgggtgccactagtggatgccacagatttcgatgcaccaacatttatcacttcacttgcgccattaaagcacaatgcatgttttttaaggacaaaactatgctttgccccatgcacaaaccaaagggaattcatgagcaagaattaagttactttgcagtcttcaggagggtctatgttcagcgtgatgaggtgcgacagattgctagcatcgtgcaacgaggagaacgggaccatacctttcgcgtgggtagcctcatcttccacacaattggtcagctgcttccacagcagatgcaagcattccattctcctaaagcactcttccctgtgggctatgaagccagccggctgtactggagcactcgctatgccaataggcgctgccgctacctgtgctccattgaggagaaggatgggcgcccagtgtttgtcatcaggattgtggaacaaggccatgaagacctggttctaagtgacatctcacctaaaggtgtctgggataagattttggagcctgtggcatgtgtgagaaaaaagtctgaaatgctccagcttttcccagcgtatttaaaaggagaggatctgtttggcctgaccgtctctgcagtggcacgcatagcggaatcacttcctggggttgaggcatgtgaaaattataccttccgatacggccgaaatcctctcatggaacttcctcttgccgttaaccccacaggttgtgcccgttctgaacctaaaatgagtgcccatgtcaagaggtttgtgttaaggcctcacaccttaaacagcaccagcacctcaaagtcatttcagagcacagtcactggagaactgaacgcaccttatagtaaacagtttgttcactccaagtcatcgcagtaccggaagatgaaaactgaatggaaatccaatgtgtatctggcacggtctcggattcaggggctgggcctgtatgctgctcgagacattgagaaacacaccatggtcattgagtacatcgggactatcattcgaaacgaagtagccaacaggaaagagaagctttatgagtctcagaaccgtggtgtgtacatgttccgcatggataacgaccatgtgattgacgcgacgctcacaggagggcccgcaaggtatatcaaccattcgtgtgcacctaattgtgtggctgaagtggtgacttttgagagaggacacaaaattatcatcagctccagtcggagaatccagaaaggagaagagctctgctatgactataagtttgactttgaagatgaccagcacaagattccgtgtcactgtggagctgtgaactgccggaagtggatgaactga

SEQ ID NO: 108 - DNA, 16614 bp, Homo sapiens
atggacagccagaagctggctggtgaggataaagattcagaaccggcagctgatggacctgcagcttctgaggacccaagtgccactgagtcagacctgcccaacccacatgtgggagaggtctctgtccttagttctgggagtcccaggcttcaggagactcctcaggactgcagtgggggtccggtgcggcgttgtgctctctgtaactgcggggagcccagtctacacgggcagcgggagctacggcgctttgagttgccatttgattggccccggtgtccagtggtgtcccctggggggagcccagggcccaatgaggcagtgctgcccagtgaggacctatcacagattggtttccctgagggccttacacctgcccacctaggagaacctggagggtcctgctgggctcaccattggtgtgctgcatggtcggcaggcgtatgggggcaggagggcccagaactatgtggtgtggacaaggccatcttctcagggatctcacagcgctgctcccactgcaccaggctcggtgcctccatcccttgccgctcacctggatgtccacggctttaccacttcccctgcgcgactgccagcggttccttcctatccatgaaaacactgcagctgctatgcccagagcacagtgagggggctgcatatctggaggaggctcgctgtgcagtgtgtgaggggccaggggagttgtgtgacctgttcttctgtaccagctgtgggcatcactatcacggggcctgcctggacactgctctgactgcccgcaaacgtgctggctggcagtgccctgaatgcaaagtgtgccaagcctgcaggaaacctgggaatgactctaagatgttggtttgtgagacgtgtgacaaaggataccatactttctgcctaaaaccacccatggaggaactgcctgctcactcttggaagtgcaaggcgtgccgggtgtgccgggcctgtggggcgggctcagcagaactgaatcccaactcggagtggtttgagaactactctctctgtcaccgctgtcacaaagcccagggaggtcagactatccgctccgttgctgagcagcataccccggtgtgtagcagattttcacccccagagcctggcgatacccccactgacgagcccgatgctctgtacgttgcatgccaagggcagccaaagggtgggcacgtgacctctatgcaacccaaggaaccagggcccctgcaatgtgaagccaaaccactagggaaagcaggggtccaacttgagccccagttggaggcccccctaaacgaggagatgccactgctgcccccacctgaggagtcacccctgtccccaccacctgaggaatcacccacgtccccaccacctgaggcatcacgcctgtcaccaccacctgaggaattgcccgcatccccacttcctgaggcattgcacctgtcccggccgctggaggaatcgcccctctctccgccgcctgaggagtctcctctgtctcccccacctgaatcatcacctttttctccactggaggagtcgcccttgtctccaccggaagagtcacccccatctcctgcacttgagacgcctctatccccaccacctgaagcatcgcccctgtccccaccatttgaagaatctcctttgtccccgccacctgaggaattgcccacttccccgccacctgaagcatctcgcctgtctccaccacctgaggagtcacccatgtcccctccacctgaagagtcacccatgtctccaccaccggaggcatctcgtctgttcccaccatttgaagagtctcctctgtcccctccacctgaggagtctcccctttccccaccacctgaggcatcacgcctgtccccaccacctgaggactcgcctatgtccccaccacctgaagaatcacctatgtcccccccacctgaggtatcgcgcctatcccccctgcctgtggtgtcacgcctgtctccaccgcctgaggaatctcccttgtccccaccgcctgaggagtctcccacgtcccctccacctgaggcttcacgcctctccccaccacctgaggactcccccacatccccaccacctgaggactcacctgcttccccaccaccggaggactcgctcatgtccctgccgctggaggagtcacccctgttgccactacctgaggagccgcaactctgcccccggtccgaggggccgcacctgtcaccccggcctgaggagccgcacctgtccccccggcctgaggagccacacctatctccgcaggctgaggagccacacctgtccccccagcctgaggagccatgcctatgcgctgtgcctgaggagccacacttgtccccccaggctgagggaccacatctgtcccctcagcctgaggaattgcacctgtccccccagactgaggagccgcacctgtctcctgtgcctgaggagccatgcttgtccccccaacctgaggaatcacacctgtccccccagtctgaggagccatgcctgtccccccggcctgaggaatcgcatctgtcccctgagcttgagaagccacccctgtcccctcggcctgaaaagccccctgaggagccaggccaatgccctgcacctgaggagctgcccttgttccctccccctggggaaccatccttatctcccttgcttggagagccagccctgtctgagcctggggaaccacctctgtcccctctgcccgaggagctgccgttgtccccatctggggagccatccttgtcgcctcagctgatgccaccagatccccttcctcctccactctcacccatcatcacagctgcggccccaccggccctgtctcctttgggggagttagagtacccctttggtgccaaaggggacagtgaccctgagtcaccgttggctgcccccatcctggagacacccatcagccctccaccagaagctaactgcactgaccctgagcctgtcccccctatgatccttcccccatctccaggctccccagtggggccggcttctcccatcctgatggagccccttcctcctcagtgttcgccactccttcagcattccctggttccccaaaactcccctccttcccagtgctctcctcctgccctaccactgtccgttccctccccgttgagtcccatagggaaggtagtgggggtctcagatgaggctgagctgcacgagatggagactgagaaagtttcagaacctgaatgcccagccttggaacccagtgccaccagtcctctcccttccccaatgggggacctttcctgccccgcccccagccctgccccagccctggatgacttctctggcctaggggaagacacagcccctctggatgggattgatgctccgggttcacagccagagcctggacagacccctggcagtttggctagtgaacttaaaggctcccctgtgctcctggaccccgaggagctggcccctgtgacccctatggaggtctaccccgaatgcaagcagacagcagggcagggctcaccatgtgaagaacaggaagagccacgtgcaccggtggcccccacaccacccactctcatcaaatccgacatcgttaacgagatctctaatctgagccagggtgatgccagtgccagttttcctggctcagagcccctcctgggctctccagacccggaggggggtggctccctgtccatggagttgggggtctctacggatgttagtccagcccgagatgagggctccctacggctctgtactgactcactgccagagactgatgactcactattgtgcgatgctgggacagctatcagcggaggcaaagctgagggggagaaggggcggcggcgcagctccccagcccgttcccgcatcaaacagggtcgcagcagcagtttcccaggaagacgccggcctcgtggaggagcccatggaggacgtggtagaggacgggcccggctaaagtcaactgcttcttccattgagactctggtagttgctgacattgatagctctcccagtaaggaggaggaggaagaagatgatgacaccatgcagaataccgtggttctcttctccaacacagacaaatttgtcctaatgcaggacatgtgtgtggtatgtggcagctttggccggggggcagagggccacctccttgcctgttcgcagtgctctcagtgctatcacccttactgtgtcaacagcaagatcaccaaggtgatgctgctcaagggctggcgttgtgtggagtgtattgtgtgtgaggtgtgtggccaggcctccgacccctcacgcctgctgctctgtgatgactgtgatattagctaccacacatactgcctggaccccccactgctcaccgtccccaagggcggctggaagtgcaagtggtgtgtgtcctgtatgcagtgtggggctgcttcccctggcttccactgtgaatggcagaatagttacacacactgtgggccctgtgccagcctggtgacctgccctatctgtcatgctccttacgtagaagaggacctactaatccagtgccgccactgtgaacggtggatgcatgcaggctgtgagagcctcttcacagaggacgatgtggagcaggcagccgatgaaggctttgactgtgtctcctgccagccctacgtggtaaagcctgtggcgcctgttgcacctccagagctggtgcccatgaaggtgaaagagccagagccccagtactttcgcttcgaaggtgtgtggctgacagaaactggcatggccttgctgcgtaacctgaccatgtcaccactgcacaagcggcgccaacggcgaggacggcttggcctcccaggcgaggcaggattggagggttctgagccctcagatgcccttggccctgatgacaagaaggatggggacctggacaccgatgagctgctcaagggtgaaggtggtgtggagcacatggagtgcgaaattaaactggagggccccgtcagccctgatgtggagcctggcaaagaggagaccgaggaaagcaaaaaacgcaagcgtaaaccatatcggcctggcattggtggtttcatggtgcgacagcggaaatcccacacacgcacgaaaaaggggcctgctgcacaggcggaggtgttgagtggggatgggcagcccgacgaggtgatacctgctgacctgcctgcagagggcgccgtggagcagagcttagctgaaggggatgagaagaagaagcaacagcggcgagggcgcaagaagagcaaactggaggacatgttccctgcttacttgcaggaagccttctttgggaaggagctgctggacctgagccgtaaggccctttttgcagttggggtgggccggccaagctttggactagggaccccaaaagccaagggagatggaggctcagaaaggaaggaactccccacatcgcagaaaggagatgatggtccagatattgcagatgaagaatcccgtggcctcgagggcaaagccgatacaccaggacctgaggatgggggcgtgaaggcatccccagtgcccagtgaccctgagaagccaggcaccccaggtgaagggatgcttagctctgacttagacaggatttccacagaagaactgcccaagatggaatccaaggacctgcagcagctcttcaaggatgttctgggctctgaacgagaacagcatctgggttgtggaacccctggcctagaaggcagccgtacgccactgcagaggccctttcttcaaggtggactccctttgggcaatctgccctccagcagcccaatggactcctacccaggcctctgccagtccccgttcctggattctagggagcgcgggggcttctttagcccggaacccggtgagcccgacagcccctggacgggctcaggtggcaccacgccctccacccccacaacccccaccacggagggtgagggcgacggactctcctataaccagcggagtcttcagcgctgggagaaggatgaggagttgggccagctgtccaccatctcacctgtgctctatgccaacattaattttcctaatctcaagcaagactacccagactggtcaagccgttgcaaacaaatcatgaagctctggagaaaggttccagcagctgacaaagccccctacctgcaaaaggccaaagataaccgggcagctcaccgcatcaacaaggtgcagaagcaggctgagagccagatcaacaagcagaccaaggtgggcgacatagcccgtaagactgaccgaccggccctacatctccgcattcccccgcagccaggggcactgggcagcccgccccccgctgctgcccccaccattttcattggcagccccactacccccgccggcttgtctacctctgcggacgggttcctgaagccgccggcgggctcggtgcctggccctgactcgcctggtgagctcttcctcaagctcccaccccaggtgcccgcccaagtgccttcgcaggacccctttggactggcccctgcctatcccctggagccccgcttccccacggcaccgcccacctatcccccctatcctagtcctacgggggcccctgcgcagcccccgatgctgggcgcctcatctcgtcctggggctggccagccaggggaattccacactaccccacctggcacccccagacaccagccctccacacctgacccattcctcaaaccccgctgcccctcgctggataacttggctgtgcctgagagccctggggtagggggaggcaaagcttccgagcccctgctctcgcccccaccttttggggagtcccggaaggccctagaggtgaagaaggaagagcttggggcatcctctcctagctatgggcccccaaacctgggctttgttgactcaccctcctcaggcacccacctgggtggcctggagttaaagacacctgatgtcttcaaagcccccctgacccctcgggcatctcaggtagagccccagagcccgggcttgggcctaaggccccaggagccaccccctgcccaggctttggcaccttctcctccaagtcacccagacatctttcgccctggctcctacactgacccatatgctcagcccccattgactcctcggccccaacctccgccccctgagagctgctgtgctctgccccctcgctcactgccctccgaccctttctcccgagtgcctgccagtcctcagtcccagtccagctcccagtctccactgacaccccggcctctgtctgctgaagctttttgcccatcacccgttacccctcgcttccagtcccctgacccttattctcgcccaccctcacgccctcagtcccgtgacccatttgccccattgcataagccaccccgaccccagccccctgaagttgcctttaaggctgggtctctagcccacacttcgctgggggctggggggttcccagcagccctgcccgcggggccagcaggtgagctccatgccaaggtcccaagtgggcagccccccaattttgtccggtcccctgggacgggtgcatttgtgggcaccccctctcccatgcgtttcactttccctcaggcagtaggggagccttccctaaagccccctgtccctcagcctggtctcccgccaccccatgggatcaacagccattttgggcccggccccaccttgggcaagcctcaaagcacaaactacacagtagccacagggaacttccacccatcgggcagccccctggggcccagcagcgggtccacaggggagagctatgggctgtccccactacgccctccgtcggttctgccaccacctgcacccgacggatccctcccctacctgtcccatggagcctcacagcgatcaggcatcacctctcctgtcgaaaagcgagaagacccagggactggaatgggtagctctttggcgacagctgaactcccaggtacccaggacccaggcatgtccggccttagccaaacagagctggagaagcaacggcagcgccagcgactacgagagctgctgattcggcagcagatccagcgcaacaccctgcggcaggagaaggaaacagctgcagcagctgcaggagcagtggggcctccaggcagctggggtgctgagcccagcagccctgcctttgagcagctgagtcgaggccagaccccctttgctgggacacaggacaagagcagccttgtggggttgcccccaagcaagctgagtggccccatcctggggccagggtccttccctagcgatgaccgactctcccggccacctccaccagccacgccttcctctatggatgtgaacagccggcaactggtaggaggctcccaagctttctatcagcgagcaccctatcctgggtccctgcccttacagcagcaacagcaacaactgtggcagcaacaacaggcaacagcagcaacctccatgcgatttgccatgtcagctcgctttccatcaactcctggacctgaacttggccgccaagccctaggttccccgttggcgggaatttccacccgtctgccaggccctggtgagccagtgcctggtccagctggtcctgcccagttcattgagctgcggcacaatgtacagaaaggactgggacctgggggcactccgtttcctggtcagggcccacctcagagaccccgtttttaccctgtaagtgaggacccccaccgactggctcctgaagggcttcggggcctggcggtatcaggtcttcccccacagaaaccctcagccccaccggcccctgaattgaacaacagtcttcatccaacaccccacaccaagggtcctaccctgccaactggtttggagctggtcaaccggcccccgtcgagcactgagcttggccgccccaatcctctggccctggaagctgggaagttgccctgtgaggatcccgagctggatgacgattttgatgcccacaaggccctagaggatgatgaagagcttgctcacctgggtctgggtgtggatgtggccaagggtgatgatgaacttggcaccttagaaaacctggagaccaatgacccccacttggatgacctgctcaatggagacgagtttgacctgctggcatatactgatcctgagctggacactggggacaagaaggatatcttcaatgagcacctgaggctggtagaatcggctaatgagaaggctgaacgggaggccctgctgcggggggtggagccaggacccttgggccctgaggagcgccctccccctgctgctgatgcctctgaaccccgcctggcatctgtgctccctgaggtgaagcccaaggtggaggagggtggacgccacccttctccttgccaattcaccattgctacccccaaggtagagcccgcacctgctgccaattcccttggcctggggctaaagccaggacagagcatgatgggcagccgggatacccggatgggcacagggccattttctagcagtgggcacacagctgagaaggcctcctttggggccacgggaggaccaccagctcacctgctgacccccagcccactgagtggcccaggaggatcctccctgctggaaaagtttgagctcgagagtggggctttgaccttgcctggtggacctgcagcatctggggatgagctagacaagatggagagctcactggtagccagcgagttacccctgctcattgaggacctgttggagcatgagaagaaggagctgcagaagaagcagcagctttcagcacagttgcagcctgcccagcagcagcagcaacagcagcagcagcattccctactgtctgcaccaggccctgcccaggccatgtctttgccacatgagggctcttctcccagtttggctgggtcccaacagcagctttccctgggtcttgcaggtgcccgacagccaggtttgccccagccactgatgcccacccagccaccagctcatgccctccagcaacgcctggctccatccatggctatggtgtccaatcaagggcatatgctaagtgggcagcatggagggcaggcaggcttggtaccccagcagagctcacagccagtgctatcacagaagcccatgggcaccatgccaccttccatgtgcatgaagccgcagcaattggcaatgcagcagcagctggcaaacagcttcttcccagatacagacctggacaaatttgctgcagaagatatcattgatcccattgcaaaggccaagatggtggctttgaaaggcatcaagaaagtgatggctcagggcagcattggggtggcacctggtatgaacagacagcaagtgtctctgctagcccagaggctctcggggggacctagcagtgatctgcagaaccatgtggcagctgggagtggccaggagcggagtgctggtgatccctcccagcctcgtcccaacccgcccacttttgctcagggagtgatcaatgaagctgaccagcggcagtatgaggagtggctgttccatacccagcagctcctacagatgcagctgaaggtgctagaggagcagattggtgtacaccgcaagtcccggaaggctctgtgtgccaagcagcgcactgccaaaaaagctggccgtgagttcccagaagctgatgctgagaagctcaagctggttacagagcagcagagcaagatccagaaacaactggatcaggtccggaaacagcagaaggagcacactaatctcatggcagaatatcggaacaagcagcagcaacaacagcagcagcagcagcaacaacagcaacagcactcagctgtgctggctctcagcccttcccagagtccccggctgctcaccaagctccctggtcagctgctccctggccatgggctgcagccaccacaggggcctccgggtgggcaagccggaggtcttcgcctgacccctgggggtatggcactacctggacagcctggtggccccttccttaatacagctctggcccaacagcagcaacagcaacattctggtggggctggatccctggctggcccttcagggggcttcttccctggcaaccttgctcttcgaagcctcggacctgattcaaggcttttacaggaaaggcagctgcagctgcagcagcaacgtatgcagctggcccagaaactgcagcagcagcagcagcagcaacagcagcagcagcaccttctaggacaggtggcaatccagcagcaacagcagcagggtcctggagtacagacaaaccaagctctgggtcccaagccccagggccttatgcctcccagcagccaccaaggcctcctggtccagcagctgtcccctcaaccaccccaggggccccagggcatgctgggccctgcccaggtggctgtgttgcagcagcagcaccctggagctttgggcccccagggccctcacagacaggtgcttatgacccagtcccgggtgctcagttccccccagctggcacagcagggtcagggccttatgggacacaggctggtcacagcccagcagcagcagcagcaacaacagcaccaacagcaagggtccatggcagggctgtcccatcttcagcagagtctgatgtcacacagtgggcagcccaaactgagcgctcagcccatgggctctttacagcagcttcagcagcagcagcagctgcaacagcaacagcaacttcagcagcagcagcagcagcagctacaacagcaacagcaacttcagcagcaacagcttcaacagcagcaacagcagcagcagcttcaacaacagcagcagcaacagcttcaacagcagcaacagcagctacaacagcaacagcaacaacaacagcagcagtttcaacagcagcagcaacagcagcagatgggccttttaaaccagagtcgaactttactgtctcctcagcaacaacagcagcagcaagtggcacttggccctggcatgccagcaaagcctcttcaacacttttctagccctggagccctgggtccaaccctcctcctgacgggcaaggaacaaaacaccgtagacccagccgtttcttcagaggccactgaggggccctctacacatcagggagggccgttagcaataggaactacccctgagtcaatggccactgaaccaggagaggtaaagccctcactctctggggactcacaactcctgcttgtccaaccccagccccagcctcagcccagctctctgcagctgcagccacctctgaggcttccaggacaacagcagcagcaagttagcctgctccacacagcaggtggaggaagccatgggcagctaggcagtggatcatcttctgaggcctcatctgtgccccacctgctggctcagccctctgtttccttaggggatcagcctgggtccatgacccagaaccttctgggcccccaacagcccatgctagagcggcccatgcaaaataatacagggccacaacctcccaaaccaggacctgtcctccagtctgggcagggtctgcctggggttggaatcatgcctacggtgggtcagcttcgagcacagctccaaggagtcctggccaaaaacccacagctgcggcacttaagtcctcagcagcagcagcagctacaggcactcctcatgcagcggcagctgcagcagagtcaggcagtacgccagaccccaccctaccaggagcctgggacccagacctctcccctccagggcctcctgggctgccaacctcaacttgggggcttccctggaccacagacaggccccctccaggagctaggggcagggcctcgacctcagggcccaccccggctccctgccccaccaggagccttatctacaggaccagtccttggccctgtccatcccacacctccaccatccagccctcaagagccaaagagaccttcacaattaccttcccccagctcccagcttcccactgaggcccagctccctcccacccatccagggacccccaaacctcaggggccaaccttggagccgcctcctgggagggtctcacctgctgctgcccagcttgcagataccttgtttagcaagggtctgggaccttgggatcccccagacaacctagcagaaacccagaagccagagcagagcagcctggtacctgggcatctggaccaggtgaatggacaggtggtgcctgaggcatcccaactcagcatcaagcaggaacctcgggaagagccatgtgccctgggagcccagtcagtgaagagggaggccaatggggagccaataggggcaccaggaaccagcaaccacctcctgctggcaggccctcgctcagaagctgggcatctgctcttgcagaagctactccgggcaaagaatgtgcaactcagcactgggcgggggtccgaggggctgcgagctgagatcaacgggcacattgacagcaagctggctgggctggagcagaaactacagggtacccccagcaacaaggaggatgcagcagcaaggaagcctttgacaccgaagcccaagcgggtacagaaggcaagcgacaggttggtgagctcccgaaagaagctgcggaaggaggacggggtcagggccagcgaggccttgctgaaacagctgaaacaggagctgtccctgctgcccctaacggagcctgctatcaccgccaattttagcctctttgccccctttggcagtggctgcccagtcaatgggcagagccagctgaggggggcctttggaagtggggcgctgcccactggccctgactactattcccagctgcttaccaagaataacctgagtaacccgccgacaccaccctcgtcgctgccccccaccccacccccatcggtgcagcagaagatggtgaatggcgtcaccccatctgaagagctgggggagcaccccaaggatgctgcctctgcccgggatagtgaaagggcactgagggatacttcagaggtgaagagtctagacctgctggctgccttgcctacaccccctcacaatcagactgaggatgtcaggatggagagtgatgaggatagcgattctcctgacagcattgtgccagcttcatcccctgagagcatcttgggggaggaggcccctcgtttccctcatctgggctcaggccggtgggagcaagaggaccgggccctctcccctgtcatccccctcattcctcgggccagcatcccagtcttcccagataccaaaccttatggggcccttggcctggaggtccctggaaagctgcctgtcacaacttgggaaaagggcaaaggaagtgaggtgtcagtcatgctcacagtctctgctgctgcagccaagaacctgaatggcgtgatggtggcagtggcggagctgctgagcatgaagatccccaactcctatgaggtgctgttcccagagagccccgcccgggcaggcactgagccaaagaagggggaagctgagggtcctggtgggaaggaaaagggtctggaaggcaagagcccagacactggccctgattggctgaagcagtttgatgcagtgttgcctggctataccctgaagagccaactagacatcttgagcctcctgaaacaggagagccccgccccagagccacccactcagcacagctatacctacaatgtctccaatctggatgtgcgacagctctcggccccacctcctgaagaaccctccccgcccccttcccccttggcaccttctcctgccagtccccctactgagcccttggttgaacttcccaccgaacccttggctgagccacccgtcccctcacctctgccactggcctcatcccctgaatcagcccgacccaagccccgtgcccggccccctgaagaaggtgaagattcccgtcctcctcgcctcaagaaatggaaaggagtgcgctggaagcggcttcggctgctgctgaccatccagaagggcagtgggcggcaggaggatgagcgggaagtggcagagtttatggagcagcttggcacagccttgcgacctgacaaggtaccgcgagacatgcgtcgctgctgtttctgtcatgaggagggtgacggggccactgatgggcctgcccgtctgctgaacctggacctggacctgtgggtgcacctcaactgtgccctttggtccacggaggtgtatgagacccagggcggggcactgatgaatgtggaggttgccctgcaccgaggactgctaaccaagtgctccctgtgccagcgaactggtgccaccagcagctgcaatcgcatgcgttgccccaatgtctaccattttgcttgtgccatccgtgccaagtgcatgttcttcaaggacaagaccatgctgtgtccaatgcataagatcaaggggccctgtgagcaagagctgagctcttttgctgtcttccggcgggtctacattgagcgggacgaggtgaagcaaatcgctagcatcattcagcggggagaacggctgcacatgttccgtgtggggggccttgtgttccacgccatcggacagctgctgcctcaccagatggctgactttcatagtgccactgccctctatcccgtgggctacgaggccacgcgcatctattggagcctccgcaccaacaatcgtcgctgctgctatcgctgttctattggtgagaacaacgggcggccggagtttgtaatcaaagtcatcgagcagggcctggaggacctggtcttcactgacgcctctccccaggccgtgtggaatcgcatcattgagcctgtggctgccatgagaaaagaggctgacatgctgcgactcttccctgagtatctgaagggcgaggagctctttgggctgacggtgcatgccgtgcttcgcatagctgaatcactgcccggggtggagagctgtcaaaactatttattccgctatgggcgccacccccttatggagctgccactcatgatcaaccccactggctgtgcccgatcagagcctaaaatcctcacacactacaaacggccccataccctgaacagcaccagcatgtctaaggcatatcagagcaccttcacaggcgagaccaacaccccctacagcaagcagtttgtgcactccaagtcatctcagtaccggcggctgcgcaccgaatggaagaacaacgtgtacctggctcgctcccgtatccagggcctggggctctatgcagccaaggacctagaaaagcacacaatggttatcgagtacattggcaccatcattcggaacgaggtggccaaccggcgggagaaaatctacgaagagcagaatcgaggcatctacatgttccgaataaacaatgaacatgtgattgatgctacgttgaccggcggccctgccaggtacattaaccattcctgtgcccctaactgtgtggccgaagtcgtgacatttgacaaagaggacaaaatcatcatcatctccagccggcgaatccccaaaggagaggagctaacctatgactatcagtttgattttgaggacgatcagcacaagatcccctgccactgtggagcctggaattgtcggaaatggatgaactaa

SEQ ID NO: 109 - DNA, 567 bp, Homo sapiens
atgactgaatataaacttgtggtagttggagctggtggcgtaggcaagagtgccttgacgatacagctaattcagaatcattttgtggacgaatatgatccaacaatagaggattcctacaggaagcaagtagtaattgatggagaaacctgtctcttggatattctcgacacagcaggtcaagaggagtacagtgcaatgagggaccagtacatgaggactggggagggctttctttgtgtatttgccataaataatactaaatcatttgaagatattcaccattatagagaacaaattaaaagagttaaggactctgaagatgtacctatggtcctagtaggaaataaatgtgatttgccttctagaacagtagacacaaaacaggctcaggacttagcaagaagttatggaattccttttattgaaacatcagcaaagacaagacagggtgttgatgatgccttctatacattagttcgagaaattcgaaaacataaagaaaagatgagcaaagatggtaaaaagaagaaaaagaagtcaaagacaaagtgtgtaattatgtaa

SEQ ID NO: 110 - DNA, 1704 bp, Homo sapiens
atgaagccagtgtgggtcgccacccttctgtggatgctactgctggtgcccaggctgggggccgcccggaaggggtccccagaagaggcctccttctactatggaaccttccctcttggcttctcctggggcgtgggcagttctgcctaccagacggagggcgcctgggaccaggacgggaaagggcctagcatctgggacgtcttcacacacagtgggaaggggaaagtgcttgggaatgagacggcagatgtagcctgtgacggctactacaaggtccaggaggacatcattctgctgagggaactgcacgtcaaccactaccgattctccctgtcttggccccggctcctgcccacaggcatccgagccgagcaggtgaacaagaagggaatcgaattctacagtgatcttatcgatgcccttctgagcagcaacatcactcccatcgtgaccttgcaccactgggatctgccacagctgctccaggtcaaatacggtgggtggcagaatgtgagcatggccaactacttcagagactacgccaacctgtgctttgaggcctttggggaccgtgtgaagcactggatcacgttcagtgatcctcgggcaatggcagaaaaaggctatgagacgggccaccatgcgccgggcctgaagctccgcggcaccggcctgtacaaggcagcacaccacatcattaaggcccacgccaaagcctggcattcttataacaccacgtggcgcagcaagcagcaaggtctggtgggaatttcattgaactgtgactggggggaacctgtggacattagtaaccccaaggacctagaggctgccgagagatacctacagttctgtctgggctggtttgccaaccccatttatgccggtgactacccccaagtcatgaaggactacattggaagaaagagtgcagagcaaggcctggagatgtcgaggttaccggtgttctcactccaggagaagagctacattaaaggcacatccgatttcttgggattaggtcattttactactcggtacatcacggaaaggaactacccctcccgccaggggcccagctaccagaacgatcgtgacttgatagagctggttgacccaaactggccagatctggggtctaaatggctatattctgtgccatggggatttaggaggctccttaactttgctcagactcaatacggtgatcctcccatatatgtgatggaaaatggagcatctcaaaaattccactgtactcaattatgtgatgagtggagaattcaataccttaaaggatacataaatgaaatgctaaaagctataaaagatggtgctaatataaaggggtatacttcctggtctctgttggataagtttgaatgggagaaaggatactcagatagatatggattctactatgttgaatttaacgacagaaataagcctcgctatccaaaggcttcagttcaatattacaagaagattatcattgccaatgggtttcccaatccaagagaggtggaaagttggtacctcaaagctttggaaacttgctctatcaacaatcagatgcttgctgcagagcccttgctaagtcacatgcaaatggttacggagatcgtggtacccactgtctgctccctctgtgtcctcatcactgctgttctactaatgctcctcctgaggaggcagagctga

SEQ ID NO: 111 - DNA, 1182 bp, Homo sapiens
atgcccaagaagaagccgacgcccatccagctgaacccggcccccgacggctctgcagttaacgggaccagctctgcggagaccaacttggaggccttgcagaagaagctggaggagctagagcttgatgagcagcagcgaaagcgccttgaggcctttcttacccagaagcagaaggtgggagaactgaaggatgacgactttgagaagatcagtgagctgggggctggcaatggcggtgtggtgttcaaggtctcccacaagccttctggcctggtcatggccagaaagctaattcatctggagatcaaacccgcaatccggaaccagatcataagggagctgcaggttctgcatgagtgcaactctccgtacatcgtgggcttctatggtgcgttctacagcgatggcgagatcagtatctgcatggagcacatggatggaggttctctggatcaagtcctgaagaaagctggaagaattcctgaacaaattttaggaaaagttagcattgctgtaataaaaggcctgacatatctgagggagaagcacaagatcatgcacagagatgtcaagccctccaacatcctagtcaactcccgtggggagatcaagctctgtgactttggggtcagcgggcagctcatcgactccatggccaactccttcgtgggcacaaggtcctacatgtcgccagaaagactccaggggactcattactctgtgcagtcagacatctggagcatgggactgtctctggtagagatggcggttgggaggtatcccatccctcctccagatgccaaggagctggagctgatgtttgggtgccaggtggaaggagatgcggctgagaccccacccaggccaaggacccccgggaggccccttagctcatacggaatggacagccgacctcccatggcaatttttgagttgttggattacatagtcaacgagcctcctccaaaactgcccagtggagtgttcagtctggaatttcaagattttgtgaataaatgcttaataaaaaaccccgcagagagagcagatttgaagcaactcatggttcatgcttttatcaagagatctgatgctgaggaagtggattttgcaggttggctctgctccaccatcggccttaaccagcccagcacaccaacccatgctgctggcgtctaa

SEQ ID NO: 112 - DNA, 1233 bp, Homo sapiens
atggcggctccgagcccgagcggcggcggcggctccgggggcggcagcggcagcggcacccccggccccgtagggtccccggcgccaggccacccggccgtcagcagcatgcagggctttcagataaacttctgtgaaaaggcacaaagtaaacgcaaagcactgaagttgaattttgcaaatccacctttcaaatctacagcaaggtttactctgaatcccaatcctacaggagttcaaaacccacacatagagagactgagaacacacagcattgagtcatcaggaaaactgaagatctcccctgaacaacactgggatttcactgcagaggacttgaaagaccttggagaaattggacgaggagcttatggttctgtcaacaaaatggtccacaaaccaagtgggcaaataatggcagttaaaagaattcggtcaacagtggatgaaaaagaacaaaaacaacttcttatggatttggatgtagtaatgcggagtagtgattgcccatacattgttcagttttatggtgcactcttcagagagggtgactgttggatctgtatggaactcatgtctacctcgtttgataagttttacaaatatgtatatagtgtattagatgatgttattccagaagaaattttaggcaaaatcactttagcaactgtgaaagcactaaaccacttaaaagaaaacttgaaaattattcacagagatatcaaaccttccaatattcttctggacagaagtggaaatattaagctctgtgacttcggcatcagtggacagcttgtggactctattgccaagacaagagatgctggctgtaggccatacatggcacctgaaagaatagacccaagcgcatcacgacaaggatatgatgtccgctctgatgtctggagtttggggatcacattgtatgagttggccacaggccgatttccttatccaaagtggaatagtgtatttgatcaactaacacaagtcgtgaaaggagatcctccgcagctgagtaattctgaggaaagggaattctccccgagtttcatcaactttgtcaacttgtgccttacgaaggatgaatccaaaaggccaaagtataaagagcttctgaaacatccctttattttgatgtatgaagaacgtgccgttgaggtcgcatgctatgtttgtaaaatcctggatcaaatgccagctactcccagctctcccatgtatgtcgattga

SEQ ID NO: 113 - DNA, 4539 bp, Homo sapiens
atggcggcggcggcggggaatcgcgcctcgtcgtcgggattcccgggcgccagggctacgagccctgaggcaggcggcggcggaggagccctcaaggcgagcagcgcgcccgcggctgccgcgggactgctgcgggaggcgggcagcgggggccgcgagcgggcggactggcggcggcggcagctgcgcaaagtgcggagtgtggagctggaccagctgcctgagcagccgctcttccttgccgcctcaccgccggcctcctcgacttccccgtcgccggagcccgcggacgcagcggggagtgggaccggcttccagcctgtggcggtgccgccgccccacggagccgcgagccgcggcggcgcccaccttaccgagtcggtggcggcgccggacagcggcgcctcgagtcccgcagcggccgagcccggggagaagcgggcgcccgccgccgagccgtctcctgcagcggcccccgccggtcgtgagatggagaataaagaaactctcaaagggttgcacaagatggatgatcgtccagaggaacgaatgatcagggagaaactgaaggcaacctgtatgccagcctggaagcacgaatggttggaaaggagaaataggcgagggcctgtggtggtaaaaccaatcccagttaaaggagatggatctgaaatgaatcacttagcagctgagtctccaggagaggtccaggcaagtgcggcttcaccagcttccaaaggccgacgcagtccttctcctggcaactccccatcaggtcgcacagtgaaatcagaatctccaggagtaaggagaaaaagagtttccccagtgccttttcagagtggcagaatcacaccaccccgaagagccccttcaccagatggcttctcaccatatagccctgaggaaacaaaccgccgtgttaacaaagtgatgcgggccagactgtacttactgcagcagatagggcctaactctttcctgattggaggagacagcccagacaataaataccgggtgtttattgggcctcagaactgcagctgtgcacgtggaacattctgtattcatctgctatttgtgatgctccgggtgtttcaactagaaccttcagacccaatgttatggagaaaaactttaaagaattttgaggttgagagtttgttccagaaatatcacagtaggcgtagctcaaggatcaaagctccatctcgtaacaccatccagaagtttgtttcacgcatgtcaaattctcatacattgtcatcatctagtacttctacgtctagttcagaaaacagcataaaggatgaagaggaacagatgtgtcctatttgcttgttgggcatgcttgatgaagaaagtcttacagtgtgtgaagacggctgcaggaacaagctgcaccaccactgcatgtcaatttgggcagaagagtgtagaagaaatagagaacctttaatatgtcccctttgtagatctaagtggagatctcatgatttctacagccacgagttgtcaagtcctgtggattccccttcttccctcagagctgcacagcagcaaaccgtacagcagcagcctttggctggatcacgaaggaatcaagagagcaattttaaccttactcattatggaactcagcaaatccctcctgcttacaaagatttagctgagccatggattcaggtgtttggaatggaactcgttggctgcttattttctagaaactggaatgtgagagagatggccctcaggcgtctttcccatgatgtcagtggggccctgctgttggcaaatggggagagcactggaaattctgggggcagcagtggaagcagcccgagtgggggagccaccagtgggtcttcccagaccagtatctcaggagatgtggtggaggcatgctgcagcgttctgtcaatggtctgtgctgaccctgtctacaaagtgtacgttgctgctttaaaaacattgagagccatgctggtatatactccttgccacagtttagcggaaagaatcaaacttcagagacttctccagccagttgtagacaccatcctagtcaaatgtgcagatgccaatagccgcacaagtcagctgtccatatcaacactgttggaactgtgcaaaggccaagcaggagagttggcagttggcagagaaatactaaaagctggatccattggtattggtggtgttgattatgtcttaaattgtattcttggaaaccaaactgaatcaaacaattggcaagaacttcttggccgcctttgtcttatagatagactgttgttggaatttcctgctgaattttatcctcatattgtcagtactgatgtttcacaagctgagcctgttgaaatcaggtataagaagctgctgtccctcttaacctttgctttgcagtccattgataattcccactcaatggttggcaaactttccagaaggatctacttgagttctgcaagaatggttactacagtaccccatgtgttttcaaaactgttagaaatgctgagtgtttccagttccactcacttcaccaggatgcgtcgccgtttgatggctattgcagatgaggtggaaattgccgaagccatccagttgggcgtagaagacactttggatggtcaacaggacagcttcttgcaggcatctgttcccaacaactatctggaaaccacagagaacagttcccctgagtgcacagtccatttagagaaaactggaaaaggattatgtgctacaaaattgagtgccagttcagaggacatttctgagagactggccagcatttcagtaggaccttctagttcaacaacaacaacaacaacaacaacagagcaaccaaagccaatggttcaaacaaaaggcagaccccacagtcagtgtttgaactcctctcctttatctcatcattcccaattaatgtttccagccttgtcaaccccttcttcttctaccccatctgtaccagctggcactgcaacagatgtctctaagcatagacttcagggattcattccctgcagaataccttctgcatctcctcaaacacagcgcaagttttctctacaattccacagaaactgtcctgaaaacaaagactcagataaactttccccagtctttactcagtcaagacccttgccctccagtaacatacacaggccaaagccatctagacctaccccaggtaatacaagtaaacagggagatccctcaaaaaatagcatgacacttgatctgaacagtagttccaaatgtgatgacagctttggctgtagcagcaatagtagtaatgctgttatacccagtgacgagacagtgttcaccccagtagaggagaaatgcagattagatgtcaatacagagctcaactccagtattgaggaccttcttgaagcatctatgccttcaagtgatacaacagtaacttttaagtcagaagttgctgtcctgtctcctgaaaaggctgaaaatgatgatacctacaaagatgatgtgaatcataatcaaaagtgcaaagagaagatggaagctgaagaagaagaagctttagcaattgccatggcaatgtcagcgtctcaggatgccctccccatagttcctcagctgcaggttgaaaatggagaagatatcatcattattcaacaggatacaccagagactctaccaggacataccaaagcaaaacaaccgtatagagaagacactgaatggctgaaaggtcaacagataggccttggagcattttcttcttgttatcaggctcaagatgtgggaactggaactttaatggctgttaaacaggtgacttatgtcagaaacacatcttctgagcaagaagaagtagtagaagcactaagagaagagataagaatgatgagccatctgaatcatccaaacatcattaggatgttgggagccacgtgtgagaagagcaattacaatctcttcattgaatggatggcagggggatcggtggctcatttgctgagtaaatatggagccttcaaagaatcagtagttattaactacactgaacagttactccgtggcctttcgtatctccatgaaaaccaaatcattcacagagatgtcaaaggtgccaatttgctaattgacagcactggtcagagactaagaattgcagattttggagctgcagccaggttggcatcaaaaggaactggtgcaggagagtttcagggacaattactggggacaattgcatttatggcacctgaggtactaagaggtcaacagtatggaaggagctgtgatgtatggagtgttggctgtgctattatagaaatggcttgtgcaaaaccaccatggaatgcagaaaaacactccaatcatcttgctttgatatttaagattgctagtgcaactactgctccatcgatcccttcacatttgtctcctggtttacgagatgtggctcttcgttgtttagaacttcaacctcaggacagacctccatcaagagagctactgaagcatccagtctttcgtactacatggtag

SEQ ID NO: 114 - DNA, 2685 bp, Homo sapiens
atgaaccccggcttcgatttgtcccgccggaacccgcaggaggacttcgagctgattcagcgcatcggcagcggcacctacggcgacgtctacaaggcacggaatgttaacactggtgaattagcagcaattaaagtaataaaattggaaccaggagaagactttgcagttgtgcagcaagaaattattatgatgaaagactgtaaacacccaaatattgttgcttattttggaagctatctcaggcgagataagctttggatttgcatggagttttgtggaggtggttctttacaggatatttatcacgtaactggacctctgtcagaactgcaaattgcatatgttagcagagaaacactgcagggattatattatcttcacagtaaaggaaaaatgcacagagatataaagggagctaacattctattaacggataatggtcatgtgaaattggctgattttggagtatctgcacagataacagctacaattgccaaacggaagtctttcattggcacaccatattggatggctccagaagttgcagctgttgagaggaaggggggttacaatcaactctgtgatctctgggcagtgggaatcactgccatagaacttgcagagcttcagcctcctatgtttgacttacacccaatgagagcattatttctaatgacaaaaagcaattttcagcctcctaaactaaaggataaaatgaaatggtcaaatagttttcatcactttgtgaaaatggcacttaccaaaaatccgaaaaaaagacctactgctgaaaaattattacagcatccttttgtaacacaacatttgacacggtctttggcaatcgagctgttggataaagtaaataatccagatcattccacttaccatgatttcgatgatgatgatcctgagcctcttgttgctgtaccacatagaattcactcaacaagtagaaacgtgagagaagaaaaaacacgctcagagataacctttggccaagtgaaatttgatccacccttaagaaaggagacagaaccacatcatgaacttcccgacagtgatggttttttggacagttcagaagaaatatactacactgcaagatctaatctggatctgcaactggaatatggacaaggacaccaaggtggttactttttaggtgcaaacaagagtcttctcaagtctgttgaagaagaattgcatcagcgaggacacgtcgcacatttagaagatgatgaaggagatgatgatgaatctaaacactcaactctgaaagcaaaaattccacctcctttgccaccaaagcctaagtctatcttcataccacaggaaatgcattctactgaggatgaaaatcaaggaacaatcaagagatgtcccatgtcagggagcccagcaaagccatcccaagttccacctagaccaccacctcccagattacccccacacaaacctgttgccttaggaaatggaatgagctccttccagttaaatggtgaacgagatggctcattatgtcaacaacagaatgaacatagaggcacaaacctttcaagaaaagaaaagaaagatgtaccaaagcctattagtaatggtcttcctccaacacctaaagtgcatatgggtgcatgtttttcaaaagtttttaatgggtgtcccttgaaaattcactgtgcatcatcatggataaacccagatacaagagatcagtacttgatatttggtgccgaagaagggatttataccctcaatcttaatgaacttcatgaaacatcaatggaacagctattccctcgaaggtgtacatggttgtatgtaatgaacaattgcttgctatcaatatctggtaaagcttctcagctttattcccataatttaccagggctttttgattatgcaagacaaatgcaaaagttacctgttgctattccagcacacaaactccctgacagaatactgccaaggaaattttctgtatcagcaaaaatccctgaaaccaaatggtgccagaagtgttgtgttgtaagaaatccttacacgggccataaatacctatgtggagcacttcagactagcattgttctattagaatgggttgaaccaatgcagaaatttatgttaattaagcacatagattttcctataccatgtccacttagaatgtttgaaatgctggtagttcctgaacaggagtaccctttagtttgtgttggtgtcagtagaggtagagacttcaaccaagtggttcgatttgagacggtcaatccaaattctacctcttcatggtttacagaatcagataccccacagacaaatgttactcatgtaacccaactggagagagataccatccttgtatgcttggactgttgtataaaaatagtaaatctccaaggaagattaaaatctagcaggaaattgtcatcagaactcacctttgatttccagattgaatcaatagtgtgcctacaagacagtgtgctagctttctggaaacatggaatgcaaggtagaagttttagatctaatgaggtaacacaagaaatttcagatagcacaagaattttcaggctgcttggatctgacagggtcgtggttttggaaagtaggccaactgataaccccacagcaaatagcaatttgtacatcctggcgggtcatgaaaacagttactga

SEQ ID NO: 115 - DNA, 6534 bp, Homo sapiens
atggcggccttcgggatcttgagctacgaacaccggcccctgaagcggccgcggctggggcctcccgatgtttaccctcaggaccccaaacagaaggaggatgaactgacggccttgaatgtaaaacaaggtttcaataaccagcctgctgtctctggggatgagcatggcagtgccaagaacgtcagcttcaatcctgccaagatcagttccaacttcagcagcattattgcagagaaattacgttgtaatacccttcctgacactggtcgcaggaagccccaagtgaaccagaaggataacttctggctggtgactgcacgatcccagagtgccattaacacttggttcactgacttggctggcaccaagccactcacgcaactagccaaaaaggtccccattttcagtaagaaggaagaggtgtttgggtacttagccaaatacacagtgcctgtgatgcgggctgcctggctcattaagatgacctgtgcctactatgcagcaatctctgagaccaaggttaagaagagacatgttgaccctttcatggaatggactcagatcatcaccaagtacttatgggagcagttacagaagatggctgaatactaccggccagggcctgcaggaagtgggggctgtggttccacgatagggcccttgccccatgatgtagaggtggcaatccggcagtgggattacaccgagaagctggccatgttcatgtttcaggatggaatgctggacagacatgagttcctgacctgggtgcttgagtgttttgagaagatccgccctggagaggatgaattgcttaaactgctgctgcctctgcttctccgatactctggggaatttgttcagtctgcatacctgtcccgccggcttgcctacttctgtacacggagactggccctgcagctggatggtgtgagcagtcactcatctcatgttatatctgctcagtcaacaagcacgctacccaccacccctgctcctcagcccccaactagcagcacaccctcgactccctttagtgacctgcttatgtgccctcagcaccggcccctggtttttggcctcagctgtatcctacagaccatcctcctgtgctgtcctagtgccttggtttggcactactcactgactgatagcagaattaagaccggctcaccacttgaccacttgcctattgccccgtccaacctgcccatgccagagggtaacagtgccttcactcagcaggtccgtgcaaagttgcgggagatcgagcagcagatcaaggagcggggacaggcagttgaagttcgctggtctttcgataaatgccaggaagctactgcaggcttcaccattggacgggtacttcatactttggaagtgctggacagccatagttttgaacgctctgacttcagcaactctcttgactccctttgtaaccgaatctttggattgggacctagcaaggatgggcatgagatctcctcagatgatgatgctgtggtgtcattgctatgtgaatgggctgtcagctgcaagcgttctggtcggcatcgtgctatggtggtagccaagctcctggagaagagacaggcggagattgaggctgagcgttgtggagaatcagaagccgcagatgagaagggttccatcgcctctggctccctttctgctcccagtgctcccattttccaggatgtcctcctgcagtttctggatacacaggctcccatgctgacggaccctcgaagtgagagtgagcgggtggaattctttaacttagtactgctgttctgtgaactgattcgacatgatgttttctcccacaacatgtatacttgcactctcatctcccgaggggaccttgcctttggagcccctggtccccggcctccctctccctttgatgatcctgccgatgacccagagcacaaggaggctgaaggcagcagcagcagcaagctggaagatccagggctctcagaatctatggacattgaccctagttccagtgttctctttgaggacatggagaagcctgatttctcattgttctcccctactatgccctgtgaggggaagggcagtccatcccctgagaagccagatgtcgagaaggaggtgaagcccccacccaaggagaagattgaagggacccttggggttctttacgaccagccacgacacgtgcagtacgccacccattttcccatcccccaggaggagtcatgcagccatgagtgcaaccagcggttggtcgtactgtttggggtgggaaagcagcgagatgatgcccgccatgccatcaagaaaatcaccaaggatatcttgaaggttctgaaccgcaaagggacagcagaaactgaccagcttgctcctattgtgcctctgaatcctggagacctgacattcttaggtggggaggatgggcagaagcggcgacgcaaccggcctgaagccttccccactgctgaagatatctttgctaagttccagcacctttcacattatgaccaacaccaggtcacggctcaggtctcccggaatgttctggagcagatcacgagctttgcccttggcatgtcataccacttgcctctggtgcagcatgtgcagttcatcttcgacctcatggaatattcactcagcatcagtggcctcatcgactttgccattcagctgctgaatgaactgagtgtagttgaggctgagctgcttctcaaatcctcggatctggtgggcagctacactactagcctgtgcctgtgcatcgtggctgtcctgcggcactatcatgcctgcctcatcctcaaccaggaccagatggcacaggtctttgaggggctgtgtggcgtcgtgaagcatgggatgaaccggtccgatggctcctctgcagagcgctgtatccttgcttatctctatgatctgtacacctcctgtagccatttaaagaacaaatttggggagctcttcagcgacttttgctcaaaggtgaagaacaccatctactgcaacgtggagccatcggaatcaaatatgcgctgggcacctgagttcatgatcgacactctagagaaccctgcagctcacaccttcacctacacggggctaggcaagagtcttagtgagaaccctgctaaccgctacagctttgtctgcaatgcccttatgcacgtctgtgtggggcaccatgatcccgatagggtgaatgacatcgcaatcctgtgtgcagagctgaccggctattgcaagtcactgagtgcagaatggctaggagtgcttaaggccttgtgctgctcctctaacaatggcacttgtggtttcaacgatctcctctgcaatgttgatgtcagtgacctatcttttcatgactcgctggctacttttgttgccatcctcatcgctcggcagtgtttgctcctggaagatctgattcgctgtgctgccatcccttcactccttaatgctgcttgtagtgaacaggactctgagccaggggcccggcttacctgccgcatcctccttcaccttttcaagacaccgcagctcaatccttgccagtctgatggaaacaagcctacagtaggaatccgctcctcctgcgaccgccacctgctggctgcctcccagaaccgcatcgtggatggagccgtgtttgctgttctcaaggctgtgtttgtacttggggatgcggaactgaaaggttcaggcttcactgtgacaggaggaacagaagaacttccagaggaggagggaggaggtggcagtggtggtcggaggcagggtggccgcaacatctctgtggagacagccagtctggatgtctatgccaagtacgtgctgcgcagcatctgccaacaggaatgggtaggagaacgttgccttaagtctctgtgtgaggacagcaatgacctgcaagacccagtgttgagtagtgcccaggcgcagcgcctcatgcagctcatttgctatccacatcgactgctggacaatgaggatggggaaaacccccagcggcagcgcataaagcgcattctccagaacttggaccagtggaccatgcgccagtcttccttggagctgcagctcatgatcaagcagacccctaacaatgagatgaactccctcttggagaacatcgccaaggccacaatcgaggttttccaacagtcagcagagacagggtcatcttctggaagtactgcaagcaacatgcccagcagcagcaagaccaagcctgtgctcagctctctagagcgctctggtgtatggctggtggcccccctcattgctaaactgcccacctcagtccagggacatgtgttaaaggctgctggggaagaattggagaagggtcagcacctgggttcctcttcacgcaaagaacgtgatcgacaaaagcagaagagcatgtccctattgagccagcagcccttcttatcgctggtgctaacatgtctgaaagggcaggatgaacaacgcgagggactccttacctccctctacagccaggtgcaccagattgtgaataattggcgagatgaccagtacttagatgattgcaaaccaaagcagcttatgcatgaggcactcaaactgcggctcaacctggtggggggcatgtttgacacggtgcagcgcagcacccagcagaccacggagtgggccatgctcctcctggagatcatcatcagcggcactgtcgacatgcagtccaacaatgagctcttcactactgtgttggacatgctgagcgtgctcatcaatgggacattggctgcagacatgtctagcatctcgcaaggtagcatggaggaaaacaagcgtgcatacatgaacctggcgaagaagttgcagaaggagttgggggagcgccagtcagacagtctggaaaaggttcgccagctgctgccactgcccaagcagacccgagatgtcatcacgtgtgagccacagggctcccttatcgataccaagggcaacaagattgctggcttcgattccatcttcaagaaggagggtctacaggtttccaccaaacagaagatctcgccctgggatctttttgaggggttgaagccgtcagcaccactctcttggggctggtttggaacagtccgagtggaccggcgagtggctcgaggagaggagcagcagcggttgctgctctaccacacacacctgaggccccggccccgcgcctattacctggagccactgccactgcccccagaagatgaggagccgcctgctcctaccctgctagagcctgagaaaaaggctccagagccccccaaaactgacaaaccgggggctgctccacccagtactgaggaacgcaagaagaagtccaccaagggcaagaaacgcagccagccagctaccaagacagaggactatggaatgggcccgggtcggagcggcccttatggtgtgacagtgcctccggacctcctgcaccacccaaaccctggttctataacacaccttaactacaggcaaggctccataggcctgtacacccagaaccagccactacctgcaggtggccctcgtgtggacccataccgtcctgtgcgcttaccaatgcagaagctgcccacccgaccaacttaccctggagtgctgcccacaaccatgactggcgtcatgggtttagaaccctcctcttataagacctctgtgtaccggcagcagcaacctgcggtgccccaaggacagcgccttcgccaacagctccagcagagtcagggcatgttgggacagtcatctgtccatcagatgactcccagctcttcctacggtttgcagacttcccagggctatactccttatgtttctcatgtgggattgcagcaacacacaggccctgcaggtaccatggtgccccccagctactccagccagccttaccagagcacccacccttctaccaatcctactcttgtagatcctacccgccacctgcaacagcggcccagtggctatgtgcaccagcaggcccccacctatggacatggactgacctccactcaaaggttttcacaccagacactgcagcagacacccatgataagtaccatgactccaatgagtgcccagggcgtccaggcaggcgtccgttcaacagccatcctacctgagcagcagcagcagcagcaacagcagcaacagcaacagcagcagcagcagcaacagcaacagcagcagcagcagcagcagtaccacatccggcagcagcagcagcagcagatcctgcggcagcagcagcaacagcaacagcagcagcagcagcagcagcaacagcaacagcagcagcagcaacagcaacaacagcaacaccagcagcaacagcagcaacaggcggctcctccccaaccccagccccagtcccagccccagttccagcgccaggggcttcagcagacccagcagcagcaacagacagcagctttggtccggcaacttcaacaacagctctctaatacccagccacagcccagtaccaacatatttggacgctactga

SEQ ID NO: 116 - DNA, 4107 bp, Homo sapiens
atggagacgcaactgcagagcattttcgaagaggtggtgaaaacggaagttatagaagaggcttttcctggcatgtttatggatactcctgaagatgagaaaacaaaactaattagctgtttgggggccttcagacagttttggggtggtctttctcaggagtctcatgaacagtgtatccagtggattgttaagtttattcatggtcagcatagtcctaaaagaatttcttttctttatgactgcttagcaatggcagttgagactggtctccttccacccaggctggtttgtgaatccctgataaactctgacactcttgagtgggaaagaacacagctttgggccttaacatttaaactggttcggaaaataattgggggagtggattacaagggtgttcgagatctcttaaaagtgattttggagaagattttgacaattcctaatacagtgagctctgctgttgtacagcagcttctggcagcaagagaggttatagcatatatcttggaaagaaatgcctgcttattaccagcctattttgcagtcactgagatcaggaaactgtatcctgaaggcaaacttccacactggttacttggaaacctagtatcagactttgtggataccttcaggcccacagcaaggataaactccatttgtggtcgctgtagtcttctgccagttgtaaataattcgggtgccatttgtaattcatggaaactggatcctgctactcttcgttttcctttgaaaggccttttgccatatgataaggatctgtttgaaccacagactgctttgttgagatatgtattggagcagccttattccagggatatggtctgcaatatgctaggtttaaataagcagcacaagcagcgctgccctgtgctggaggaccagttggtggatctggttgtttatgccatggagcgatctgagaccgaggagaagtttgacgatgggggaacaagccaactcctgtggcagcatctctcaagtcagctcattttctttgtgcttttccagtttgcaagttttccacatatggtgctttctcttcatcagaagttagcagggcgaggactgattaaaggcagagatcatcttatgtgggttctcctgcaattcatttctggaagtattcagaaaaatgcactagctgattttctccctgtgatgaagctcttcgacttgctatacccagaaaaagaatatatcccagttcctgatattaacaaaccccagtcaacccatgcctttgcaatgacctgtatttggattcatctcaatagaaaagctcaaaatgacaactccaagctacagattccaatacctcattccctaagacttcaccatgagttcctgcagcagagtctaagaaataaaagtttacagatgaatgactataagattgctctattgtgtaatgcatactctacaaattcagaatgttttacattacccatgggagctctggtagaaactatttatggaaatggaattatgaggatacctctccctggaacaaactgtatggcttcaggatctattacccccttacctatgaacctcctggattcactgacagttcatgccaaaatgagccttattcacagcattgcaaccagggtgataaaacttgctcatgcaaagtccagtgtggccttggctccagccctagtggaaacttacagtcgtttattggtctatatggaaatagagtctttgggcatcaaaggatttatcagtcagcttttgccaactgttttcaaatcacatgcatgggggatcttacacacactccttgagatgtttagctaccggatgcatcatattcagcctcattacagagttcagctcctgagtcatcttcatactttggctgcagttgcacaaacaaaccagaaccagctccatctttgtgtcgagagcactgctctcaggcttataacagcattaggtagctcagaggtacaaccgcagtttacacgcttccttagtgatcccaaaacagtgctctcagcagaatctgaagaactgaaccgagccttgatattgaccttggctagagcaactcatgtaacagatttttttacaggctctgattcaattcagggaacttggtgtaaagacatacttcagaccatcatgagtttcactcctcataattgggcttcacacaccctgagctgttttccaggcccactacaggcattcttcaaacaaaataatgtgcctcaggaaagccgttttaatctgaaaaaaaatgtggaggaggagtataggaagtggaagtcaatgagcaacgaaaacgacattattacccacttctctatgcagggctcccctcctctctttctttgtcttctctggaaaatgctcttggaaacagatcatattaatcagattggctatagagtattagagagaattggagccagggccttggtagcccatgtgaggacatttgcagatttcctggtatatgagttttctacatcagcagggggtcagcaactcaataaatgcattgaaattcttaatgacatggtatggaagtataacattgttacactggacagattaattctctgcctggccatgcgtagtcacgaaggaaatgaagcccaggtttgttatttcataattcagttgctgttactcaaaccaaacgattttagaaatcgagtaagtgactttgtgaaggaaaattccccagagcactggttacagaatgactggcacaccaagcacatgaattatcacaagaaatatccagagaagttgtattttgagggcctcgcggaacaggtggatcctcctgtacagatccagtctccctatctgcccatctattttgggaatgtgtgtcttcgattccttccagtatttgatatagtaatccacagatttttagagttgcttccggtatccaaatcactggagactctactggatcatctaggaggcttatataaatttcatgatcgtccagtgacttatctgtataacactctgcactattatgaaatgcacctgagagaccgcgcatttctcaaacgaaaactcgtccatgcgatcattggctctctgaaggataatcgaccgcagggctggtgtctaagtgacacttacctgaaatgcgctatgaatgcacgagaggaaaatccttgggttccagatgacacctactattgcagattgattggcagactagtcgatacgatggctggcaaatctcctggtccctttccaaactgtgactggagattcaatgagtttcccaacccagctgcccatgctctccatgttacttgtgtggagctcatggccttggcagtttcaggcaaagaagttgggaatgcccttctaaatgttgtcctaaaaagtcagcctttagtgccaagagagaacattacagcatggatgaatgcaattggtttgatcatcactgccctaccagagccatattggattgttcttcatgatcgaattgtgagtgtcatcagcagccccagcttgacgtctgaaacagagtgggttggctatccattccgcctctttgatttcactgcctgtcatcagtcctactctgagatgagttgtagctatacgttagctcttgcacatgctgtgtggcaccattctagcatcggacaactttctctcattccaaagtttcttactgaagtacttcttcctatagtgaagaccgaattccagttgctttatgtataccatcttgttggaccatttttacaaagatttcagcaagagagaactcgttgtatgatagagattggtgtggcgttttatgacatgctgctgaatgttgaccagtgtagcacccatttaaattacatggatcccatctgtgacttcctctatcacatgaagtatatgtttactggtgacagcgtgaaagagcaagtagagaagattatctgtaacttaaaaccagctttaaaacttcgtcttcgattcatcacacacattagcaagatggagccagctgcagtgcctccacaagccatgaacagtgggtctccagcacctcagtctaatcaggtgcccgtgtctttaccagtaactcagtga

SEQ ID NO: 117 - DNA, 4173 bp, Homo sapiens
atgaaggcccccgctgtgcttgcacctggcatcctcgtgctcctgtttaccttggtgcagaggagcaatggggagtgtaaagaggcactagcaaagtccgagatgaatgtgaatatgaagtatcagcttcccaacttcaccgcggaaacacccatccagaatgtcattctacatgagcatcacattttccttggtgccactaactacatttatgttttaaatgaggaagaccttcagaaggttgctgagtacaagactgggcctgtgctggaacacccagattgtttcccatgtcaggactgcagcagcaaagccaatttatcaggaggtgtttggaaagataacatcaacatggctctagttgtcgacacctactatgatgatcaactcattagctgtggcagcgtcaacagagggacctgccagcgacatgtctttccccacaatcatactgctgacatacagtcggaggttcactgcatattctccccacagatagaagagcccagccagtgtcctgactgtgtggtgagcgccctgggagccaaagtcctttcatctgtaaaggaccggttcatcaacttctttgtaggcaataccataaattcttcttatttcccagatcatccattgcattcgatatcagtgagaaggctaaaggaaacgaaagatggttttatgtttttgacggaccagtcctacattgatgttttacctgagttcagagattcttaccccattaagtatgtccatgcctttgaaagcaacaattttatttacttcttgacggtccaaagggaaactctagatgctcagacttttcacacaagaataatcaggttctgttccataaactctggattgcattcctacatggaaatgcctctggagtgtattctcacagaaaagagaaaaaagagatccacaaagaaggaagtgtttaatatacttcaggctgcgtatgtcagcaagcctggggcccagcttgctagacaaataggagccagcctgaatgatgacattcttttcggggtgttcgcacaaagcaagccagattctgccgaaccaatggatcgatctgccatgtgtgcattccctatcaaatatgtcaacgacttcttcaacaagatcgtcaacaaaaacaatgtgagatgtctccagcatttttacggacccaatcatgagcactgctttaataggacacttctgagaaattcatcaggctgtgaagcgcgccgtgatgaatatcgaacagagtttaccacagctttgcagcgcgttgacttattcatgggtcaattcagcgaagtcctcttaacatctatatccaccttcattaaaggagacctcaccatagctaatcttgggacatcagagggtcgcttcatgcaggttgtggtttctcgatcaggaccatcaacccctcatgtgaattttctcctggactcccatccagtgtctccagaagtgattgtggagcatacattaaaccaaaatggctacacactggttatcactgggaagaagatcacgaagatcccattgaatggcttgggctgcagacatttccagtcctgcagtcaatgcctctctgccccaccctttgttcagtgtggctggtgccacgacaaatgtgtgcgatcggaggaatgcctgagcgggacatggactcaacagatctgtctgcctgcaatctacaaggttttcccaaatagtgcaccccttgaaggagggacaaggctgaccatatgtggctgggactttggatttcggaggaataataaatttgatttaaagaaaactagagttctccttggaaatgagagctgcaccttgactttaagtgagagcacgatgaatacattgaaatgcacagttggtcctgccatgaataagcatttcaatatgtccataattatttcaaatggccacgggacaacacaatacagtacattctcctatgtggatcctgtaataacaagtatttcgccgaaatacggtcctatggctggtggcactttacttactttaactggaaattacctaaacagtgggaattctagacacatttcaattggtggaaaaacatgtactttaaaaagtgtgtcaaacagtattcttgaatgttataccccagcccaaaccatttcaactgagtttgctgttaaattgaaaattgacttagccaaccgagagacaagcatcttcagttaccgtgaagatcccattgtctatgaaattcatccaaccaaatcttttattagtggtgggagcacaataacaggtgttgggaaaaacctgaattcagttagtgtcccgagaatggtcataaatgtgcatgaagcaggaaggaactttacagtggcatgtcaacatcgctctaattcagagataatctgttgtaccactccttccctgcaacagctgaatctgcaactccccctgaaaaccaaagcctttttcatgttagatgggatcctttccaaatactttgatctcatttatgtacataatcctgtgtttaagccttttgaaaagccagtgatgatctcaatgggcaatgaaaatgtactggaaattaagggaaatgatattgaccctgaagcagttaaaggtgaagtgttaaaagttggaaataagagctgtgagaatatacacttacattctgaagccgttttatgcacggtccccaatgacctgctgaaattgaacagcgagctaaatatagagtggaagcaagcaatttcttcaaccgtccttggaaaagtaatagttcaaccagatcagaatttcacaggattgattgctggtgttgtctcaatatcaacagcactgttattactacttgggtttttcctgtggctgaaaaagagaaagcaaattaaagatctgggcagtgaattagttcgctacgatgcaagagtacacactcctcatttggataggcttgtaagtgcccgaagtgtaagcccaactacagaaatggtttcaaatgaatctgtagactaccgagctacttttccagaagatcagtttcctaattcatctcagaacggttcatgccgacaagtgcagtatcctctgacagacatgtcccccatcctaactagtggggactctgatatatccagtccattactgcaaaatactgtccacattgacctcagtgctctaaatccagagctggtccaggcagtgcagcatgtagtgattgggcccagtagcctgattgtgcatttcaatgaagtcataggaagagggcattttggttgtgtatatcatgggactttgttggacaatgatggcaagaaaattcactgtgctgtgaaatccttgaacagaatcactgacataggagaagtttcccaatttctgaccgagggaatcatcatgaaagattttagtcatcccaatgtcctctcgctcctgggaatctgcctgcgaagtgaagggtctccgctggtggtcctaccatacatgaaacatggagatcttcgaaatttcattcgaaatgagactcataatccaactgtaaaagatcttattggctttggtcttcaagtagccaaaggcatgaaatatcttgcaagcaaaaagtttgtccacagagacttggctgcaagaaactgtatgctggatgaaaaattcacagtcaaggttgctgattttggtcttgccagagacatgtatgataaagaatactatagtgtacacaacaaaacaggtgcaaagctgccagtgaagtggatggctttggaaagtctgcaaactcaaaagtttaccaccaagtcagatgtgtggtcctttggcgtgctcctctgggagctgatgacaagaggagccccaccttatcctgacgtaaacacctttgatataactgtttacttgttgcaagggagaagactcctacaacccgaatactgcccagaccccttatatgaagtaatgctaaaatgctggcaccctaaagccgaaatgcgcccatccttttctgaactggtgtcccggatatcagcgatcttctctactttcattggggagcactatgtccatgtgaacgctacttatgtgaacgtaaaatgtgtcgctccgtatccttctctgttgtcatcagaagataacgctgatgatgaggtggacacacgaccagcctccttctgggagacatcatag

SEQ ID NO: 118 - DNA, 9198 bp, Homo sapiens
atggaggagaaacagcagattatattggctaatcaagatggtggaacagtggcaggagcagcacctaccttctttgtcatcttaaagcagccaggaaatggcaaaactgatcaaggaattttggttactaatcaggatgcctgtgctttggctagtagtgtgtcatcaccagtaaaatctaaagggaagatttgccttccagctgattgtactgtgggtggaatcactgttaccctcgataacaatagtatgtggaatgagttctatcatcgaagcacagagatgattctgaccaagcaaggaagacgcatgtttccttactgtcgttattggataacaggtttagattcaaatttgaagtatattcttgtcatggatatatctcctgtggataaccatcgttataagtggaatggtcgttggtgggaacctagtgggaaggctgaacctcatgttttggggagggttttcattcatccagaatctccttccacaggtcattattggatgcatcaaccagtatctttctataaactcaaacttaccaacaatacactggaccaagaagggcatatcatcttgcactctatgcatcgttacctgccgaggcttcatttggtgcctgcagaaaaggctgtggaggtgatacaattaaatggccctggtgtccacacttttaccttcccacagactgaattctttgcagtaacagcttatcagaacattcagattactcagctgaaaatagattacaatccatttgccaaaggctttcgggatgatgggctgaataataagccccagagagatggaaaacaaaagaacagctctgaccaagaagggaataatatttccagttcttctggtcatcgggtccgtcttacagaaggtcaggggtcagagatacaaccaggtgatttggatcctttgtcaaggggtcatgaaacatcaggcaagggtttggagaagacttcccttaatataaaacgagactttcttggtttcatggatactgattcagcacttagtgaagttcctcaattgaagcaagagatttctgaatgtcttattgccagcagttttgaagatgactcccgtgtagcctcaccgttagaccagaacggaagcttcaatgttgttattaaagaggaacctctagatgattatgactacgaacttggtgagtgcccagaaggggtcactgtgaaacaggaagagacagatgaagagacggatgtatactcaaacagtgatgatgatcctatactagagaaacagctaaagaggcacaataaagttgacaacccagaagctgaccatctatcttctaaatggcttccaagcagcccatcaggtgttgctaaagctaaaatgttcaaattagacactggaaagatgccagtagtctatctggagccctgtgctgtcaccagaagcacagttaagatttctgaactccccgataacatgctttccacatctcgaaaggataaatcttctatgttggcagaattggaatatttgcctacatacattgaaaattccaatgagactgccttctgcttaggcaaggaatcagaaaatggtcttagaaaacattcaccagatctcagagtggtacaaaaatatcccttactgaaagagcctcagtggaaatatcctgatatatctgacagcattagcacagaaagaatactcgacgattcaaaggattcagttggagactcactttcaggaaaagaggacttgggcagaaagagaacaactatgcttaagattgcaacagccgcaaaggtagtgaatgctaatcagaatgcctctccaaatgtccctggaaaaagaggaaggccacgaaaattgaaactctgtaaggcaggacgaccacctaagaacacaggaaagtctttaatttctacaaagaatacacctgtaagccctgggagtacctttccagatgtgaagcctgatctggaagatgtggatggtgttctctttgtttcctttgaatcaaaggaagctctagacattcatgcagttgatgggacaacagaagaatcttctagtctccaggcatcaaccacaaatgactcaggttacagagcaagaatttcccagttggaaaaggaattgatagaagatttgaagactttgcggcacaagcaggtgatacatcctggtcttcaagaagtgggcttaaaattgaattcagtggatccaacaatgagcattgatcttaaatacttgggagtacagttacctttggctccagctactagctttcctttttggaaccttacaggaaccaaccctgcctctcctgatgcgggatttccctttgtttctaggacagggaaaaccaatgatttcactaagatcaagggatggaggggaaaatttcatagtgcttctgcatctaggaatgaaggtggaaattcagaaagttcactgaaaaatcgttctgctttctgtagtgataagctagatgaatacttggaaaatgaaggcaagctgatggaaacaagcatgggtttttcttctaatgctcccacatctcctgtggtgtaccagcttcccactaagagtaccagttatgtacgaacacttgatagtgtactaaagaagcaatctactatttccccttctacctcttattctttgaaacctcattctgtaccccctgtctctcgaaaggcaaagtctcaaaacagacaggcaactttcagtggccgaactaaatcatcttataaatccattttaccataccctgtttcaccaaagcagaaatactctcatgtgattctaggagataaggttaccaagaattcttcaggcatcatctcagaaaatcaggcgaataactttgttgtgccaactttggatgaaaatatatttccaaagcagattagtttgcggcaggcacagcagcagcagcaacagcaacagggaagtcgccctccaggcttgtctaaatctcaggtgaagctaatggacctggaagactgtgcactttgggaaggaaaaccaaggacatacatcacagaagagcgagcagatgtatccttaacaactctacttacagctcaagcatccctcaaaactaaacctatccacacaatcataaggaaacgagcccctccctgcaacaatgacttctgtcgactgggttgtgtatgttccagtctagctttggagaagcgccaacctgctcactgccgccgaccagactgcatgtttggttgtacttgtttgaaaagaaaagttgtacttgttaaaggaggatccaaaactaagcattttcagaggaaggctgctcatcgagatccagtattttatgatactctgggagaggaggcaagggaggaggaagaaggaatcagggaggaggaggaacaattgaaagagaaaaagaagagaaagaagctagaatacactatatgtgagacagagcctgaacagcctgttcgacattacccattatgggtaaaagtagaaggtgaagtagatccagaaccagtttatatccccacgccttctgtcattgagcctatgaaaccattgttattgcctcagccagaagttttatctcctactgtgaagggcaaactgctcactggaattaaatctccacggtcatatactcccaaacccaatcctgtgattcgggaagaggacaaagatccagtctacttgtactttgaaagtatgatgacttgtgctcgagttcgagtatatgagcgaaaaaaagaggaccagagacaaccatcttcctcctcctccccatctccatcatttcagcagcaaacttcatgtcattctagccctgagaaccataataatgcaaaggaacctgattctgaacagcagcccttaaaacaactcacctgtgacttggaggatgattctgataaattacaagaaaagagctggaagtcttcctgcaatgaaggagaatcctcttctacttcttatatgcatcagaggtcacctggtggtcccaccaaactgattgagatcatctcagactgcaactgggaggaagatcggaacaagattttgagcatcttatcccagcacatcaatagcaacatgccacaatcacttaaggtgggcagcttcatcattgagttggcttctcagcgaaagagccggggtgagaagaaccctcctgtttattcttctcgtgtgaaaatctctatgccatcatgtcaagaccaagatgatatggctgagaaatctggatcagagactcctgatggtccattgtcccctgggaaaatggaggatatctctcctgtgcagacagatgccctggattcagtgagggagagattacatggaggcaaaggtctgcctttttatgcagggctttctcctgcagggaagcttgtggcctataaacgtaaacccagttcaagtacatctgggcttatccaggtagcatccaatgccaaggtggctgcatccaggaaaccacgtaccctgttgccttcaacatccaattccaaaatggcatcctcctctggcactgcaacaaatcgccctgggaagaatctgaaggcgtttgtcccagcaaaacggccaattgcggctcgaccctctcctggtggtgtgttcacacagtttgtgatgagtaaagttggagccttgcagcagaagatacctggagttagcacaccccaaaccctggcagggacacagaagttcagtatcagaccttctccagtaatggtcgtcacacctgtggtttcttctgagccagttcaggtgtgcagccctgtgactgctgctgtcactactaccacccctcaagtgtttttagaaaatactactgctgtgacacctatgactgctatttctgacgtggaaactaaagaaactacttattcttctggtgccaccactacaggggttgttgaggtctctgaaactaataccagcacctctgtaacatctacccagtctacagccactgtgaaccttaccaaaaccactgggataactacccctgtggcttcagttgcttttcctaagtctttggtagcatctccttcaaccataactcttcctgttgcttccactgcttccacctccttagtcgtggtgactgcagctgcatcttcctccatggtgaccacaccaacttcatctctgggctctgttcctattatactctcaggaattaatgggagtccaccagtgagccagagaccagaaaatgctgctcaaattccagtggctactccacaggtctctcctaacacagtgaaacgtgctggacctcgattgttgttgattccagtgcagcagggttctcctactcttagacctgtctcaaacacacaacttcagggacatcggatggtcttgcagcctgttaggagtccaagtggaatgaacttattcaggcaccctaatgggcagattgtccagcttctacctttgcatcagcttcgaggctctaatacccagcccaacttacagcctgtcatgtttcggaacccagggtctgtgatgggaatccggttacctgctccttccaaaccctctgagactccgccatcttccacttcgtcctctgctttctctgtcatgaatcctgtaattcaagctgttgggtcttcttcagcagtgaatgttatcactcaggcaccatcattgctttcctctggagctagttttgtgtctcaggctggtacattgaccctgaggatttctcctcctgaaccacaaagctttgcaagtaaaacaggctctgaaaccaaaataacttatagctcaggaggacagcctgttggtacagccagtcttattcctctccagtctggtagttttgccttgttacagctcccaggacaaaagcctgttcctagctccattcttcagcatgttgcttcccttcagatgaagagagaatctcagaatccagaccagaaagatgaaacaaactcaataaaaagagagcaagaaacgaagaaggttctacagtcagaaggagaggctgtagaccctgaggctaatgtaataaaacaaaactcaggagctgctacctcagaagaaactctgaatgattccttggaagataggggtgatcatttggatgaagaatgccttccagaagaaggttgtgcaactgtcaaaccatctgagcattcctgtatcactgggtcacatacagatcaagattataaagatgttaatgaagaatatggggctaggaatcgtaagagttccaaagaaaaagtggctgttctggaagttaggaccatttctgaaaaagccagtaataagacagtccaaaatttaagtaaagtacagcatcaaaaacttggtgatgtgaaggtggaacagcagaaaggatttgacaatccagaagaaaactcaagtgaatttccagtcacctttaaggaagaaagtaaatttgaattgtcaggaagcaaagttatggagcagcaatctaatctacagccagaggccaaagagaaggaatgtggagactctctggagaaagacagggaaagatggagaaaacatctgaagggccccttaaccaggaaatgtgttggagcttcacaggaatgtaagaaagaggcagacgagcagttaattaaagaaacaaagacatgtcaggaaaattcagatgtgtttcagcaagaacaaggcatctctgacttacttggaaaaagtggaattactgaagatgccagagttttgaaaactgaatgtgattcttggagtaggatttctaatccttcagccttctccattgttcctaggagagctgcaaaaagcagcagagggaatggacattttcagggtcacttactgctacctggagaacagatacaaccaaagcaagagaagaagggtgggagaagcagtgctgacttcactgttttggatttggaagaagatgatgaagatgataatgagaaaactgatgattctattgatgaaattgtggatgttgtttctgactaccagagtgaggaggttgatgatgtagaaaagaataactgtgtagaatacattgaggatgatgaggagcacgtggacattgagactgtagaagagctctcagaggaaattaatgttgctcacctgaagaccacagcggcccacacacagtcattcaaacagccgtcctgtactcacatctctgcagatgaaaaagcagctgaaaggagtcgaaaggctccaccaattcctctaaaactgaagcctgattactggagtgacaaactacagaaagaagcagaagcgtttgcttattatcgccggacacacactgccaatgagcggcggcggcgtggtgaaatgagggatctctttgagaaattaaagatcacattgggattacttcattcttccaaggtttccaaaagtctcattcttactcgagccttcagtgaaattcagggactaacagatcaggcagacaaattgataggacagaaaaatctcctgactcgaaaacggaatattctgatacggaaagtatcgtctctttcaggtaagacagaagaagtggtcctgaagaagctagagtatatttatgcaaaacagcaagcactagaggcacaaaaaagaaaaaagaagatgggatcagatgagtttgacatatctcccagaattagcaaacagcaggaaggatcttctgcatcatctgtagatcttggacagatgtttataaataacaggagggggaaacctttgattctttccagaaaaaaagaccaggccacagaaaatacctcacccttgaacactccacacacctctgccaaccttgtgatgactccgcaagggcaattgctcaccctaaaaggtcccctattctcaggaccagtggtagctgtttctcctgatctcttagaatctgatcttaagcctcaagttgccggtagtgctgtggctctaccagaaaatgacgacttatttatgatgccacgaattgttaatgtgacatcattggccacagagggaggtttggtagatatgggtggcagcaaatatcctcatgaagttcctgatagcaagccatctgaccatctgaaagacaccgtcaggaatgaagataattccttagaggataagggtagaatctcttccagaggaaacagagatggcagagtgacgttgggtccaacgcaggtttttctggcaaacaaagattctggttatccacaaatagttgacgtttccaatatgcagaaagcacaagagttcttacctaaaaagatttctggtgatatgagagggattcagtataaatggaaagagagtgaatcaagaggggagagagtgaagtcaaaggattcttcatttcataaattaaagatgaaagatctcaaggactcaagcatagagatggaactgaggaaagtaacatcagctatagaggaagcagctcttgattccagtgaactgctgactaacatggaagatgaggatgatactgatgagacactgacttcactgctcaatgaaattgcctttcttaatcaacaactaaatgatgactctgttggcctggctgaactacccagctctatggatacagagttcccaggggatgctcggcgggcttttattagtaaggttcctcctggaagcagagcaactttccaggttgagcacttgggaactggtttgaaagagttgcctgatgttcaaggggagagtgactctatcagtcccctcctcttgcacttggaagacgatgacttttctgagaatgaaaaacaacttgcagaaccagcctctgagccagatgtccttaagattgttattgactctgaaataaaggattccctcctttccaacaagaaagctattgatggagggaagaatacttctggcctccctgcagagcccgaaagtgtgtcctcaccccccaccctacacatgaagactggcttggagaacagcaacagcacagacactttgtggaggcctatgccaaagttggcccctctaggtttaaaagtagctaatccttccagtgatgcagatggtcagagtctcaaggtgatgccttgtttggcacctatagctgccaaagttgggtcagttggacacaaaatgaacttaacagggaatgaccaggaaggccgggaaagcaaggtgatgcctacattggcacctgttgtggctaaattgggcaactcgggggcctcaccaagttctgcagggaaatga

SEQ ID NO: 119 - DNA, 2088 bp, Homo sapiens
atgtcacctcctaaggacccttctccttctcttcctcttccttcatcgtcttcccattcatcttccccaccatcttcttcttcaaccagtgtttctgggaatgctccagatggttcctccccgcctcagatgacagcttctgagcccctctcgcaagtctcgagaggtcatccaagtcctcccaccccaaactttcggaggcgagccgtagcccaaggagcacccagggaaattcccctgtatctgcctcatcacccaaagccagagtgggcagagtactgcctggtgagccctggtgaagatggcctctcagaccctgcagagatgacttctgatgagtgccagccagcagaggcccctcttggggacatcggaagcaaccacagagacccacaccccatctgggggaaggacaggagctggacagggcaagagctatctcccttggctggagaagaccgggaaaaagggagtactggagccaggaaggaagaagagggagggccagtgctggtaaaggagaagttgggcctgaagaagttagtcctcactcaggagcagaagaccatgttgttggattggaatgactccatccctgagagtgtgcacctcaaagctggggagcgaatttcccagaaaagtgctgagaatggtagaggaggccgtgtgctaaaaccagtccgccccctgctgctccctagggcagcaggagagcccctgccaacccagagaggggcccaggagaagatggggacccctgcggaacaagctcaaggggagcgaaacgtgcctccacccaagtccccactgcggctcatagccaatgccatccgaaggtctctagagcccctcctttccaactctgaaggcgggaagaaggcctgggccaagcaagaatccaaaactttgcccgcacaggcctgcactcgctcattcagccttcggaaaaccaattccaataaagacggggaccagcattcccctgggagaaaccagtcctcagcctttagccctcctgaccctgccctccgcacccacagtttgcccaatcggccatccaaggtctttcctgcacttaggtccccaccctgcagcaagattgaagatgtccccacactcctcgagaaagtgagtttgcaagagaacttcccagatgcttctaagcctccaaagaaaagaatctcacttttttcctccctcagactcaaagacaaatcttttgagagtttcctccaagaatccagacaaagaaaggacatcagggacctctttggcagccccaagaggaaggtgctgcctgaagatagtgcgcaggccctggagaagctgctgcagcctttcaaaagcacctccctgcgccaggcagctcctcctcctcctcctcctcctcctcctcctcctcctcctcctacagcgggaggtgcagactccaagaactttcccctcagagcacaggtaacagaggcttcctcttctgcctcttcaacctcctcctcctctgcagatgaagaatttgatccccagctttccttgcagttaaaggagaagaagacacttagaagaagaaagaagctagaaaaagcaatgaagcagttggttaagcaagaagaattgaaaagactctataaggctcaggccatccagaggcagctggaggaggtggaggagcggcagagggcttctgagatccagggtgtgaggctggagaaggcgttgcgaggagaagcagattcaggcacacaggatgaagcacagcttttgcaggaatggtttaagctggttctggagaagaataaattaatgcgatatgagtcggagctcctaatcatggcccaggaactggaattagaagatcatcaaagcagactggagcagaaactgagagagaaaatgctcaaggaggagagccagaaagatgagaaggatctaaacgaagagcaagaagtattcaccgagctgatgcaagtgattgagcaaagggacaaactcgtcgattccttagaggaacaacgcatcagagaaaaagccgaggaccagcactttgaaagcttcgtattctccagaggctgtcagctgagcaggacttga

SEQ ID NO: 120 - DNA, 2814 bp, Homo sapiens
atgctcctgtaccgaggggcccccgccggccctggcgcgccgggctgcgggctggcccggcccggcggcggcccgcaggccttcgggatccgcctgagcacgatgagcccccgctacctccagagcaactccagcagccacacgcgacccttcagtgccatcgcggagctgctagataatgctgtagatccagatgtatctgccaggacggtctttatagatgttgaggaggtcaagaataaatcttgtttgacctttaccgatgatggatgtgggatgacacctcataaactacaccgaatgctcagctttggctttacagataaagtaataaagaagagccagtgtcccattggggtctttggtaatggtttcaagtcaggctccatgcggctaggaaaggacgcccttgtcttcaccaagaatgggggtactctcactgttggacttctatcacagacctatctggaatgtgtccaggcccaggcagttattgtaccaattgttccattcaaccagcaaaacaaaaaaatgattattaccgaggattcattgcccagcctagaagccatcttgaactattccattttcaaccgtgaaaatgacctgctggcccagtttgatgccatcccaggcaaaaaaggcactcgtgttctcatttggaacatccgcagaaataaaaatggaaaatctgagttggactttgatacagatcaatatgacatcctggtatcagactttgacacagaagaaaaaatgactggcggtgttacctctgagctaccagaaacagaatattctttaagggcattttgtggtattctatacatgaagccacgcatgaaaatttttctgcgtcaaaagaaggtgactacccagatgattgccaagagcctggccaatgtagaatatgatacatataaacctaccttcacaaataagcaggtgagaatcacctttgggttctcttgcaagaatagtaaccagtttggaataatgatgtatcataacaaccgactcataaaatcttttgagaaggtggggtgccaggtgaagccaactcgtggagaaggtgtaggagtaattggagtcattgagtgcaatttcctaaaacctgcctacaacaaacaagactttgagtataccaaggagtaccggctaacaataaatgcccttgcccagaagctcaatgcttactggaaggaaaaaacatctcaagataattttgagacctcaactgtagccaggccaataccgaaggttcctgaccagacatgggttcagtgtgatgagtgtcttaaatggagaaagcttcctgggaagattgatccatccatgttacctgcaagatggttttgttattataattcccatccaaagtacaggagatgctctgttccagaggaacaagaactcactgatgaagacctgtgcttgagcaaagctaagaaacaagaacaaactgttgaggagaagaagaagatgcctatggaaaatgagaaccaccaggtattcagtaatccaccaaagatccttactgttcaagaaatggctggattgaataacaagacaattggatatgagggaattcatagccctagtgtgcttccttctggtggagaagaaagcagatcaccatctcttcaacttaagcctctggattccagtgttttacagttttccagtaagtacaaatggatcctaggtgaagaaccggtggagaaacgaagaaggctccagaatgagatgacaacaccttctctagattattccatgcctgctccttacaggagggtagaagcacctgttgcctacccagaaggggagaacagccatgataaatcgagttctgagagaagtacaccaccataccttttcccagaatacccagaagcaagcaagaatacaggtcagaatagggaggtttcaattctgtatccaggggccaaagaccaacgccaggggtccctgcttcctgaagaattagaagatcagatgccaagattggtggcagaagaatctaacagaggtagcacaaccataaacaaagaagaagtcaacaagggaccttttgtagctgttgtgggtgttgccaaaggtgttagagattcaggagctcccattcagctgatcccttttaacagagaggagcttgctgagagacgaaaagcagttgaatcctggaacccagtgccttattctgtggcctctgctgcaatccctgctgcagccattggggagaaagcaagaggctatgaggagagcgaaggtcataatacaccaaagttgaagaaccagagagagctggaagaattgaagagaaccacagaaaaattggaacgtgttttggctgaaaggaatttgttccagcaaaaggtggaggagctggaacaggagaggaatcactggcagtctgaattcaagaaagtccaacatgaattggtgatctacagtacccaggaggcggaaggcttgtactggagcaagaaacacatgggttatcgccaagctgaattccagattctgaaagctgagctggaaagaaccaaagaggaaaagcaagagttaaaagagaaactgaaggaaacagagacacacctggaaatgctgcagaaggctcaggtctcctaccggaccccagagggagatgacctagaaagggctttggcaaagcttacgcggctacgtatccacgtcagctatctccttacttctgtcctccctcacttggagcttcgtgagatcgggtatgactcagaacaagtggatgggatcctgtacacggtgctggaggcaaatcacatactggattga

SEQ ID NO: 121 - DNA, 2238 bp, Homo sapiens
atgggggttcccttcttctcttctctcagatgcatggtggacttaggaccttgctgggctgggggtctcactgcagagatgaagctgcttctggccctagcagggctcctggccattctggccacgccccagccctctgaaggtgctgctccagctgtcctgggggaggtggacacctcgttggtgctgagctccatggaggaggccaagcagctggtggacaaggcctacaaggagcggcgggaaagcatcaagcagcggcttcgcagcggctcagccagccccatggaactcctatcctacttcaagcagccggtggcagccaccaggacggcggtgagggccgctgactacctgcacgtggctctagacctgctggagaggaagctgcggtccctgtggcgaaggccattcaatgtcactgatgtgctgacgcccgcccagctgaatgtgttgtccaagtcaagcggctgcgcctaccaggacgtgggggtgacttgcccggagcaggacaaataccgcaccatcaccgggatgtgcaacaacagacgcagccccacgctgggggcctccaaccgtgcctttgtgcgctggctgccggcggagtatgaggacggcttctctcttccctacggctggacgcccggggtcaagcgcaacggcttcccggtggctctggctcgcgcggtctccaacgagatcgtgcgcttccccactgatcagctgactccggaccaggagcgctcactcatgttcatgcaatggggccagctgttggaccacgacctcgacttcacccctgagccggccgcccgggcctccttcgtcactggcgtcaactgcgagaccagctgcgttcagcagccgccctgcttcccgctcaagatcccgcccaatgacccccgcatcaagaaccaagccgactgcatcccgttcttccgctcctgcccggcttgccccgggagcaacatcaccatccgcaaccagatcaacgcgctcacttccttcgtggacgccagcatggtgtacggcagcgaggagcccctggccaggaacctgcgcaacatgtccaaccagctggggctgctggccgtcaaccagcgcttccaagacaacggccgggccctgctgccctttgacaacctgcacgatgacccctgtctcctcaccaaccgctcagcgcgcatcccctgcttcctggcaggggacacccgttccagtgagatgcccgagctcacctccatgcacaccctcttacttcgggagcacaaccggctggccacagagctcaagagcctgaaccctaggtgggatggggagaggctctaccaggaagcccggaagatcgtgggggccatggtccagatcatcacttaccgggactacctgcccctggtgctggggccaacggccatgaggaagtacctgcccacgtaccgttcctacaatgactcagtggacccacgcatcgccaacgtcttcaccaatgccttccgctacggccacaccctcatccaacccttcatgttccgcctggacaatcggtaccagcccatggaacccaacccccgtgtccccctcagcagggtcttttttgcctcctggagggtcgtgctggaaggtggcattgaccccatcctccggggcctcatggccacccctgccaagctgaatcgtcagaaccaaattgcagtggatgagatccgggagcgattgtttgagcaggtcatgaggattgggctggacctgcctgctctgaacatgcagcgcagcagggaccacggcctcccaggatacaatgcctggaggcgcttctgtgggctcccgcagcctgaaactgtgggccagctgggcacggtgctgaggaacctgaaattggcgaggaaactgatggagcagtatggcacgcccaacaacatcgacatctggatgggcggcgtgtccgagcctctgaagcgcaaaggccgcgtgggcccactcctcgcctgcatcatcggtacccagttcaggaagctccgggatggtgatcggttttggtgggagaacgagggtgtgttcagcatgcagcagcgacaggccctggcccagatctcattgccccggatcatctgcgacaacacaggcatcaccaccgtgtctaagaacaacatcttcatgtccaactcatatccccgggactttgtcaactgcagtacacttcctgcattgaacctggcttcctggagggaagcctcctag

SEQ ID NO: 122 - DNA, 7650 bp, Homo sapiens
atgcttggaaccggacctgccgccgccaccaccgctgccaccacatctagcaatgtgagcgtcctgcagcagtttgccagtggcctaaagagccggaatgaggaaaccagggccaaagccgccaaggagctccagcactatgtcaccatggaactccgagagatgagtcaagaggagtctactcgcttctatgaccaactgaaccatcacatttttgaattggtttccagctcagatgccaatgagaggaaaggtggcatcttggccatagctagcctcataggagtggaaggtgggaatgccacccgaattggcagatttgccaactatcttcggaacctcctcccctccaatgacccagttgtcatggaaatggcatccaaggccattggccgtcttgccatggcaggggacacttttaccgctgagtacgtggaatttgaggtgaagcgagccctggaatggctgggtgctgaccgcaatgagggccggagacatgcagctgtcctggttctccgtgagctggccatcagcgtccctaccttcttcttccagcaagtgcaacccttctttgacaacatttttgtggccgtgtgggaccccaaacaggccatccgtgagggagctgtagccgcccttcgtgcctgtctgattctcacaacccagcgtgagccgaaggagatgcagaagcctcagtggtacaggcacacatttgaagaagcagagaagggatttgatgagaccttggccaaagagaagggcatgaatcgggatgatcggatccatggagccttgttgatccttaacgagctggtccgaatcagcagcatggagggagagcgtctgagagaagaaatggaagaaatcacacagcagcagctggtacacgacaagtactgcaaagatctcatgggcttcggaacaaaacctcgtcacattacccccttcaccagtttccaggctgtacagccccagcagtcaaatgccttggtggggctgctggggtacagctctcaccaaggcctcatgggatttgggacctcccccagtccagctaagtccaccctggtggagagccggtgttgcagagacttgatggaggagaaatttgatcaggtgtgccagtgggtgctgaaatgcaggaatagcaagaactcgctgatccaaatgacaatccttaatttgttgccccgcttggctgcattccgaccttctgccttcacagatacccagtatctccaagataccatgaaccatgtcctaagctgtgtcaagaaggagaaggaacgtacagcggccttccaagccctggggctactttctgtggctgtgaggtctgagtttaaggtctatttgcctcgcgtgctggacatcatccgagcggccctgcccccaaaggacttcgcccataagaggcagaaggcaatgcaggtggatgccacagtcttcacttgcatcagcatgctggctcgagcaatggggccaggcatccagcaggatatcaaggagctgctggagcccatgctggcagtgggactaagccctgccctcactgcagtgctctacgacctgagccgtcagattccacagctaaagaaggacattcaagatgggctactgaaaatgctgtccctggtccttatgcacaaaccccttcgccacccaggcatgcccaagggcctggcccatcagctggcctctcctggcctcacgaccctccctgaggccagcgatgtgggcagcatcactcttgccctccgaacgcttggcagctttgaatttgaaggccactctctgacccaatttgttcgccactgtgcggatcatttcctgaacagtgagcacaaggagatccgcatggaggctgcccgcacctgctcccgcctgctcacaccctccatccacctcatcagtggccatgctcatgtggttagccagaccgcagtgcaagtggtggcagatgtgcttagcaaactgctcgtagttgggataacagatcctgaccctgacattcgctactgtgtcttggcgtccctggacgagcgctttgatgcacacctggcccaggcggagaacttgcaggccttgtttgtggctctgaatgaccaggtgtttgagatccgggagctggccatctgcactgtgggccgactcagtagcatgaaccctgcctttgtcatgcctttcctgcgcaagatgctcatccagattttgacagagttggagcacagtgggattggaagaatcaaagagcagagtgcccgcatgctggggcacctggtctccaatgccccccgactcatccgcccctacatggagcctattctgaaggcattaattttgaaactgaaagatccagaccctgatccaaacccaggtgtgatcaataatgtcctggcaacaataggagaattggcacaggttagtggcctggaaatgaggaaatgggttgatgaactttttattatcatcatggacatgctccaggattcctctttgttggccaaaaggcaggtggctctgtggaccctgggacagttggtggccagcactggctatgtagtagagccctacaggaagtaccctactttgcttgaggtgctactgaattttctgaagactgagcagaaccagggtacacgcagagaggccatccgtgtgttagggcttttaggggctttggatccttacaagcacaaagtgaacattggcatgatagaccagtcccgggatgcctctgctgtcagcctgtcagaatccaagtcaagtcaggattcctctgactatagcactagtgaaatgctggtcaacatgggaaacttgcctctggatgagttctacccagctgtgtccatggtggccctgatgcggatcttccgagaccagtcactctctcatcatcacaccatggttgtccaggccatcaccttcatcttcaagtccctgggactcaaatgtgtgcagttcctgccccaggtcatgcccacgttccttaacgtcattcgagtctgtgatggggccatccgggaatttttgttccagcagctgggaatgttggtgtcctttgtgaagagccacatcagaccttatatggatgaaatagtcaccctcatgagagaattctgggtcatgaacacctcaattcagagcacgatcattcttctcattgagcaaattgtggtagctcttgggggtgaatttaagctctacctgccccagctgatcccacacatgctgcgtgtcttcatgcatgacaacagcccaggccgcattgtctctatcaagttactggctgcaatccagctgtttggcgccaacctggatgactacctgcatttactgctgcctcctattgttaagttgtttgatgcccctgaagctccactgccatctcgaaaggcagcgctagagactgtggaccgcctgacggagtccctggatttcactgactatgcctcccggatcattcaccctattgttcgaacactggaccagagcccagaactgcgctccacagccatggacacgctgtcttcacttgtttttcagctggggaagaagtaccaaattttcattccaatggtgaataaagttctggtgcgacaccgaatcaatcatcagcgctatgatgtgctcatctgcagaattgtcaagggatacacacttgctgatgaagaggaggatcctttgatttaccagcatcggatgcttaggagtggccaaggggatgcattggctagtggaccagtggaaacaggacccatgaagaaactgcacgtcagcaccatcaacctccaaaaggcctggggcgctgccaggagggtctccaaagatgactggctggaatggctgagacggctgagcctggagctgctgaaggactcatcatcgccctccctgcgctcctgctgggccctggcacaggcctacaacccgatggccagggatctcttcaatgctgcatttgtgtcctgctggtctgaactgaatgaagatcaacaggatgagctcatcagaagcatcgagttggccctcacctcacaagacatcgctgaagtcacacagaccctcttaaacttggctgaattcatggaacacagtgacaagggccccctgccactgagagatgacaatggcattgttctgctgggtgagagagctgccaagtgccgagcatatgccaaagcactacactacaaagaactggagttccagaaaggccccacccctgccattctagaatctctcatcagcattaataataagctacagcagccggaggcagcggccggagtgttagaatatgccatgaaacactttggagagctggagatccaggctacctggtatgagaaactgcacgagtgggaggatgcccttgtggcctatgacaagaaaatggacaccaacaaggacgacccagagctgatgctgggccgcatgcgctgcctcgaggccttgggggaatggggtcaactccaccagcagtgctgtgaaaagtggaccctggttaatgatgagacccaagccaagatggcccggatggctgctgcagctgcatggggtttaggtcagtgggacagcatggaagaatacacctgtatgatccctcgggacacccatgatggggcattttatagagctgtgctggcactgcatcaggacctcttctccttggcacaacagtgcattgacaaggccagggacctgctggatgctgaattaactgcgatggcaggagagagttacagtcgggcatatggggccatggtttcttgccacatgctgtccgagctggaggaggttatccagtacaaacttgtccccgagcgacgagagatcatccgccagatctggtgggagagactgcagggctgccagcgtatcgtagaggactggcagaaaatccttatggtgcggtcccttgtggtcagccctcatgaagacatgagaacctggctcaagtatgcaagcctgtgcggcaagagtggcaggctggctcttgctcataaaactttagtgttgctcctgggagttgatccgtctcggcaacttgaccatcctctgccaacagttcaccctcaggtgacctatgcctacatgaaaaacatgtggaagagtgcccgcaagatcgatgccttccagcacatgcagcattttgtccagaccatgcagcaacaggcccagcatgccatcgctactgaggaccagcagcataagcaggaactgcacaagctcatggcccgatgcttcctgaaacttggagagtggcagctgaatctacagggcatcaatgagagcacaatccccaaagtgctgcagtactacagcgccgccacagagcacgaccgcagctggtacaaggcctggcatgcgtgggcagtgatgaacttcgaagctgtgctacactacaaacatcagaaccaagcccgcgatgagaagaagaaactgcgtcatgccagcggggccaacatcaccaacgccaccactgccgccaccacggccgccactgccaccaccactgccagcaccgagggcagcaacagtgagagcgaggccgagagcaccgagaacagccccaccccatcgccgctgcagaagaaggtcactgaggatctgtccaaaaccctcctgatgtacacggtgcctgccgtccagggcttcttccgttccatctccttgtcacgaggcaacaacctccaggatacactcagagttctcaccttatggtttgattatggtcactggccagatgtcaatgaggccttagtggagggggtgaaagccatccagattgatacctggctacaggttatacctcagctcattgcaagaattgatacgcccagacccttggtgggacgtctcattcaccagcttctcacagacattggtcggtaccacccccaggccctcatctacccactgacagtggcttctaagtctaccacgacagcccggcacaatgcagccaacaagattctgaagaacatgtgtgagcacagcaacaccctggtccagcaggccatgatggtgagcgaggagctgatccgagtggccatcctctggcatgagatgtggcatgaaggcctggaagaggcatctcgtttgtactttggggaaaggaacgtgaaaggcatgtttgaggtgctggagcccttgcatgctatgatggaacggggcccccagactctgaaggaaacatcctttaatcaggcctatggtcgagatttaatggaggcccaagagtggtgcaggaagtacatgaaatcagggaatgtcaaggacctcacccaagcctgggacctctattatcatgtgttccgacgaatctcaaagcagctgcctcagctcacatccttagagctgcaatatgtttccccaaaacttctgatgtgccgggaccttgaattggctgtgccaggaacatatgaccccaaccagccaatcattcgcattcagtccatagcaccgtctttgcaagtcatcacatccaagcagaggccccggaaattgacacttatgggcagcaacggacatgagtttgttttccttctaaaaggccatgaagatctgcgccaggatgagcgtgtgatgcagctcttcggcctggttaacacccttctggccaatgacccaacatctcttcggaaaaacctcagcatccagagatacgctgtcatccctttatcgaccaactcgggcctcattggctgggttccccactgtgacacactgcacgccctcatccgggactacagggagaagaagaagatccttctcaacatcgagcatcgcatcatgttgcggatggctccggactatgaccacttgactctgatgcagaaggtggaggtgtttgagcatgccgtcaataatacagctggggacgacctggccaagctgctgtggctgaaaagccccagctccgaggtgtggtttgaccgaagaaccaattatacccgttctttagcggtcatgtcaatggttgggtatattttaggcctgggagatagacacccatccaacctgatgctggaccgtctgagtgggaagatcctgcacattgactttggggactgctttgaggttgctatgacccgagagaagtttccagagaagattccatttagactaacaagaatgttgaccaatgctatggaggttacaggcctggatggcaactacagaatcacatgccacacagtgatggaggtgctgcgagagcacaaggacagtgtcatggccgtgctggaagcctttgtctatgaccccttgctgaactggaggctgatggacacaaataccaaaggcaacaagcgatcccgaacgaggacggattcctactctgctggccagtcagtcgaaattttggacggtgtggaacttggagagccagcccataagaaaacggggaccacagtgccagaatctattcattctttcattggagacggtttggtgaaaccagaggccctaaataagaaagctatccagattattaacagggttcgagataagctcactggtcgggacttctctcatgatgacactttggatgttccaacgcaagttgagctgctcatcaaacaagcgacatcccatgaaaacctctgccagtgctatattggctggtgccctttctggtaa

SEQ ID NO: 123 - DNA, 13482 bp, Homo sapiens
atgccaaggccagggaccatggcgctgtgtctgctgaccttggtcctctcgctcttgcccccacaagctgctgcagaacaggacctcagtgtgaacagggctgtgtgggatggaggagggtgcatctcccaaggggacgtcttgaaccgtcagtgccagcagctgtctcagcacgttaggacaggttctgcggcaaacaccgccacaggtacaacatctacaaatgtcgtggagccaagaatgtatttgagttgcagcaccaaccctgagatgacctcgattgagtccagtgtgacttcagacactcctggtgtctccagtaccaggatgacaccaacagaatccagaacaacttcagaatctaccagtgacagcaccacacttttccccagttctactgaagacacttcatctcctacaactcctgaaggcaccgacgtgcccatgtcaacaccaagtgaagaaagcatttcatcaacaatggcttttgtcagcactgcacctcttcccagttttgaggcctacacatctttaacatataaggttgatatgagcacacctctgaccacttctactcaggcaagttcatctcctactactcctgaaagcaccaccatacccaaatcaactaacagtgaaggaagcactccattaacaagtatgcctgccagcaccatgaaggtggccagttcagaggctatcacccttttgacaactcctgttgaaatcagcacacctgtgaccatttctgctcaagccagttcatctcctacaactgctgaaggtcccagcctgtcaaactcagctcctagtggaggaagcactccattaacaagaatgcctctcagcgtgatgctggtggtcagttctgaggctagcaccctttcaacaactcctgctgccaccaacattcctgtgatcacttctactgaagccagttcatctcctacaacggctgaaggcaccagcataccaacctcaacttatactgaaggaagcactccattaacaagtacgcctgccagcaccatgccggttgccacttctgaaatgagcacactttcaataactcctgttgacaccagcacacttgtgaccacttctactgaacccagttcacttcctacaactgctgaagctaccagcatgctaacctcaactcttagtgaaggaagcactccattaacaaatatgcctgtcagcaccatattggtggccagttctgaggctagcaccacttcaacaattcctgttgactccaaaacttttgtgaccactgctagtgaagccagctcatctcccacaactgctgaagataccagcattgcaacctcaactcctagtgaaggaagcactccattaacaagtatgcctgtcagcaccactccagtggccagttctgaggctagcaacctttcaacaactcctgttgactccaaaactcaggtgaccacttctactgaagccagttcatctcctccaactgctgaagttaacagcatgccaacctcaactcctagtgaaggaagcactccattaacaagtatgtctgtcagcaccatgccggtggccagttctgaggctagcaccctttcaacaactcctgttgacaccagcacacctgtgaccacttctagtgaagccagttcatcttctacaactcctgaaggtaccagcataccaacctcaactcctagtgaaggaagcactccattaacaaacatgcctgtcagcaccaggctggtggtcagttctgaggctagcaccacttcaacaactcctgctgactccaacacttttgtgaccacttctagtgaagctagttcatcttctacaactgctgaaggtaccagcatgccaacctcaacttacagtgaaagaggcactacaataacaagtatgtctgtcagcaccacactggtggccagttctgaggctagcaccctttcaacaactcctgttgactccaacactcctgtgaccacttcaactgaagccacttcatcttctacaactgcggaaggtaccagcatgccaacctcaacttatactgaaggaagcactccattaacaagtatgcctgtcaacaccacactggtggccagttctgaggctagcaccctttcaacaactcctgttgacaccagcacacctgtgaccacttcaactgaagccagttcctctcctacaactgctgatggtgccagtatgccaacctcaactcctagtgaaggaagcactccattaacaagtatgcctgtcagcaaaacgctgttgaccagttctgaggctagcaccctttcaacaactcctcttgacacaagcacacatatcaccacttctactgaagccagttgctctcctacaaccactgaaggtaccagcatgccaatctcaactcctagtgaaggaagtcctttattaacaagtatacctgtcagcatcacaccggtgaccagtcctgaggctagcaccctttcaacaactcctgttgactccaacagtcctgtgaccacttctactgaagtcagttcatctcctacacctgctgaaggtaccagcatgccaacctcaacttatagtgaaggaagaactcctttaacaagtatgcctgtcagcaccacactggtggccacttctgcaatcagcaccctttcaacaactcctgttgacaccagcacacctgtgaccaattctactgaagcccgttcgtctcctacaacttctgaaggtaccagcatgccaacctcaactcctggggaaggaagcactccattaacaagtatgcctgacagcaccacgccggtagtcagttctgaggctagaacactttcagcaactcctgttgacaccagcacacctgtgaccacttctactgaagccacttcatctcctacaactgctgaaggtaccagcataccaacctcgactcctagtgaaggaacgactccattaacaagcacacctgtcagccacacgctggtggccaattctgaggctagcaccctttcaacaactcctgttgactccaacactcctttgaccacttctactgaagccagttcacctcctcccactgctgaaggtaccagcatgccaacctcaactcctagtgaaggaagcactccattaacacgtatgcctgtcagcaccacaatggtggccagttctgaaacgagcacactttcaacaactcctgctgacaccagcacacctgtgaccacttattctcaagccagttcatcttctacaactgctgacggtaccagcatgccaacctcaacttatagtgaaggaagcactccactaacaagtgtgcctgtcagcaccaggctggtggtcagttctgaggctagcaccctttccacaactcctgtcgacaccagcatacctgtcaccacttctactgaagccagttcatctcctacaactgctgaaggtaccagcataccaacctcacctcccagtgaaggaaccactccgttagcaagtatgcctgtcagcaccacgctggtggtcagttctgaggctaacaccctttcaacaactcctgtggactccaaaactcaggtggccacttctactgaagccagttcacctcctccaactgctgaagttaccagcatgccaacctcaactcctggagaaagaagcactccattaacaagtatgcctgtcagacacacgccagtggccagttctgaggctagcaccctttcaacatctcccgttgacaccagcacacctgtgaccacttctgctgaaaccagttcctctcctacaaccgctgaaggtaccagcttgccaacctcaactactagtgaaggaagtactctattaacaagtatacctgtcagcaccacgctggtgaccagtcctgaggctagcacccttttaacaactcctgttgacactaaaggtcctgtggtcacttctaatgaagtcagttcatctcctacacctgctgaaggtaccagcatgccaacctcaacttatagtgaaggaagaactcctttaacaagtatacctgtcaacaccacactggtggccagttctgcaatcagcatcctttcaacaactcctgttgacaacagcacacctgtgaccacttctactgaagcctgttcatctcctacaacttctgaaggtaccagcatgccaaactcaaatcctagtgaaggaaccactccgttaacaagtatacctgtcagcaccacgccggtagtcagttctgaggctagcaccctttcagcaactcctgttgacaccagcacccctgggaccacttctgctgaagccacttcatctcctacaactgctgaaggtatcagcataccaacctcaactcctagtgaaggaaagactccattaaaaagtatacctgtcagcaacacgccggtggccaattctgaggctagcaccctttcaacaactcctgttgactctaacagtcctgtggtcacttctacagcagtcagttcatctcctacacctgctgaaggtaccagcatagcaatctcaacgcctagtgaaggaagcactgcattaacaagtatacctgtcagcaccacaacagtggccagttctgaaatcaacagcctttcaacaactcctgctgtcaccagcacacctgtgaccacttattctcaagccagttcatctcctacaactgctgacggtaccagcatgcaaacctcaacttatagtgaaggaagcactccactaacaagtttgcctgtcagcaccatgctggtggtcagttctgaggctaacaccctttcaacaacccctattgactccaaaactcaggtgaccgcttctactgaagccagttcatctacaaccgctgaaggtagcagcatgacaatctcaactcctagtgaaggaagtcctctattaacaagtatacctgtcagcaccacgccggtggccagtcctgaggctagcaccctttcaacaactcctgttgactccaacagtcctgtgatcacttctactgaagtcagttcatctcctacacctgctgaaggtaccagcatgccaacctcaacttatactgaaggaagaactcctttaacaagtataactgtcagaacaacaccggtggccagctctgcaatcagcaccctttcaacaactcccgttgacaacagcacacctgtgaccacttctactgaagcccgttcatctcctacaacttctgaaggtaccagcatgccaaactcaactcctagtgaaggaaccactccattaacaagtatacctgtcagcaccacgccggtactcagttctgaggctagcaccctttcagcaactcctattgacaccagcacccctgtgaccacttctactgaagccacttcgtctcctacaactgctgaaggtaccagcataccaacctcgactcttagtgaaggaatgactccattaacaagcacacctgtcagccacacgctggtggccaattctgaggctagcaccctttcaacaactcctgttgactctaacagtcctgtggtcacttctacagcagtcagttcatctcctacacctgctgaaggtaccagcatagcaacctcaacgcctagtgaaggaagcactgcattaacaagtatacctgtcagcaccacaacagtggccagttctgaaaccaacaccctttcaacaactcccgctgtcaccagcacacctgtgaccacttatgctcaagtcagttcatctcctacaactgctgacggtagcagcatgccaacctcaactcctagggaaggaaggcctccattaacaagtatacctgtcagcaccacaacagtggccagttctgaaatcaacaccctttcaacaactcttgctgacaccaggacacctgtgaccacttattctcaagccagttcatctcctacaactgctgatggtaccagcatgccaaccccagcttatagtgaaggaagcactccactaacaagtatgcctctcagcaccacgctggtggtcagttctgaggctagcactctttccacaactcctgttgacaccagcactcctgccaccacttctactgaaggcagttcatctcctacaactgcaggaggtaccagcatacaaacctcaactcctagtgaacggaccactccattagcaggtatgcctgtcagcactacgcttgtggtcagttctgagggtaacaccctttcaacaactcctgttgactccaaaactcaggtgaccaattctactgaagccagttcatctgcaaccgctgaaggtagcagcatgacaatctcagctcctagtgaaggaagtcctctactaacaagtatacctctcagcaccacgccggtggccagtcctgaggctagcaccctttcaacaactcctgttgactccaacagtcctgtgatcacttctactgaagtcagttcatctcctatacctactgaaggtaccagcatgcaaacctcaacttatagtgacagaagaactcctttaacaagtatgcctgtcagcaccacagtggtggccagttctgcaatcagcaccctttcaacaactcctgttgacaccagcacacctgtgaccaattctactgaagcccgttcatctcctacaacttctgaaggtaccagcatgccaacctcaactcctagtgaaggaagcactccattcacaagtatgcctgtcagcaccatgccggtagttacttctgaggctagcaccctttcagcaactcctgttgacaccagcacacctgtgaccacttctactgaagccacttcatctcctacaactgctgaaggtaccagcataccaacttcaactcttagtgaaggaacgactccattaacaagtatacctgtcagccacacgctggtggccaattctgaggttagcaccctttcaacaactcctgttgactccaacactcctttcactacttctactgaagccagttcacctcctcccactgctgaaggtaccagcatgccaacctcaacttctagtgaaggaaacactccattaacacgtatgcctgtcagcaccacaatggtggccagttttgaaacaagcacactttctacaactcctgctgacaccagcacacctgtgactacttattctcaagccggttcatctcctacaactgctgacgatactagcatgccaacctcaacttatagtgaaggaagcactccactaacaagtgtgcctgtcagcaccatgccggtggtcagttctgaggctagcacccattccacaactcctgttgacaccagcacacctgtcaccacttctactgaagccagttcatctcctacaactgctgaaggtaccagcataccaacctcacctcctagtgaaggaaccactccgttagcaagtatgcctgtcagcaccacgccggtggtcagttctgaggctggcaccctttccacaactcctgttgacaccagcacacctatgaccacttctactgaagccagttcatctcctacaactgctgaagatatcgtcgtgccaatctcaactgctagtgaaggaagtactctattaacaagtatacctgtcagcaccacgccagtggccagtcctgaggctagcaccctttcaacaactcctgttgactccaacagtcctgtggtcacttctactgaaatcagttcatctgctacatccgctgaaggtaccagcatgcctacctcaacttatagtgaaggaagcactccattaagaagtatgcctgtcagcaccaagccgttggccagttctgaggctagcactctttcaacaactcctgttgacaccagcatacctgtcaccacttctactgaaaccagttcatctcctacaactgcaaaagataccagcatgccaatctcaactcctagtgaagtaagtacttcattaacaagtatacttgtcagcaccatgccagtggccagttctgaggctagcaccctttcaacaactcctgttgacaccaggacacttgtgaccacttccactggaaccagttcatctcctacaactgctgaaggtagcagcatgccaacctcaactcctggtgaaagaagcactccattaacaaatatacttgtcagcaccacgctgttggccaattctgaggctagcaccctttcaacaactcctgttgacaccagcacacctgtcaccacttctgctgaagccagttcttctcctacaactgctgaaggtaccagcatgcgaatctcaactcctagtgatggaagtactccattaacaagtatacttgtcagcaccctgccagtggccagttctgaggctagcaccgtttcaacaactgctgttgacaccagcatacctgtcaccacttctactgaagccagttcctctcctacaactgctgaagttaccagcatgccaacctcaactcctagtgaaacaagtactccattaactagtatgcctgtcaaccacacgccagtggccagttctgaggctggcaccctttcaacaactcctgttgacaccagcacacctgtgaccacttctactaaagccagttcatctcctacaactgctgaaggtatcgtcgtgccaatctcaactgctagtgaaggaagtactctattaacaagtatacctgtcagcaccacgccggtggccagttctgaggctagcaccctttcaacaactcctgttgataccagcatacctgtcaccacttctactgaaggcagttcttctcctacaactgctgaaggtaccagcatgccaatctcaactcctagtgaagtaagtactccattaacaagtatacttgtcagcaccgtgccagtggccggttctgaggctagcaccctttcaacaactcctgttgacaccaggacacctgtcaccacttctgctgaagctagttcttctcctacaactgctgaaggtaccagcatgccaatctcaactcctggcgaaagaagaactccattaacaagtatgtctgtcagcaccatgccggtggccagttctgaggctagcaccctttcaagaactcctgctgacaccagcacacctgtgaccacttctactgaagccagttcctctcctacaactgctgaaggtaccggcataccaatctcaactcctagtgaaggaagtactccattaacaagtatacctgtcagcaccacgccagtggccattcctgaggctagcaccctttcaacaactcctgttgactccaacagtcctgtggtcacttctactgaagtcagttcatctcctacacctgctgaaggtaccagcatgccaatctcaacttatagtgaaggaagcactccattaacaggtgtgcctgtcagcaccacaccggtgaccagttctgcaatcagcaccctttcaacaactcctgttgacaccagcacacctgtgaccacttctactgaagcccattcatctcctacaacttctgaaggtaccagcatgccaacctcaactcctagtgaaggaagtactccattaacatatatgcctgtcagcaccatgctggtagtcagttctgaggatagcaccctttcagcaactcctgttgacaccagcacacctgtgaccacttctactgaagccacttcatctacaactgctgaaggtaccagcattccaacctcaactcctagtgaaggaatgactccattaactagtgtacctgtcagcaacacgccggtggccagttctgaggctagcatcctttcaacaactcctgttgactccaacactcctttgaccacttctactgaagccagttcatctcctcccactgctgaaggtaccagcatgccaacctcaactcctagtgaaggaagcactccattaacaagtatgcctgtcagcaccacaacggtggccagttctgaaacgagcaccctttcaacaactcctgctgacaccagcacacctgtgaccacttattctcaagccagttcatctcctccaattgctgacggtactagcatgccaacctcaacttatagtgaaggaagcactccactaacaaatatgtctttcagcaccacgccagtggtcagttctgaggctagcaccctttccacaactcctgttgacaccagcacacctgtcaccacttctactgaagccagtttatctcctacaactgctgaaggtaccagcataccaacctcaagtcctagtgaaggaaccactccattagcaagtatgcctgtcagcaccacgccggtggtcagttctgaggttaacaccctttcaacaactcctgtggactccaacactctggtgaccacttctactgaagccagttcatctcctacaatcgctgaaggtaccagcttgccaacctcaactactagtgaaggaagcactccattatcaattatgcctctcagtaccacgccggtggccagttctgaggctagcaccctttcaacaactcctgttgacaccagcacacctgtgaccacttcttctccaaccaattcatctcctacaactgctgaagttaccagcatgccaacatcaactgctggtgaaggaagcactccattaacaaatatgcctgtcagcaccacaccggtggccagttctgaggctagcaccctttcaacaactcctgttgactccaacacttttgttaccagttctagtcaagccagttcatctccagcaactcttcaggtcaccactatgcgtatgtctactccaagtgaaggaagctcttcattaacaactatgctcctcagcagcacatatgtgaccagttctgaggctagcacaccttccactccttctgttgacagaagcacacctgtgaccacttctactcagagcaattctactcctacacctcctgaagttatcaccctgccaatgtcaactcctagtgaagtaagcactccattaaccattatgcctgtcagcaccacatcggtgaccatttctgaggctggcacagcttcaacacttcctgttgacaccagcacacctgtgatcacttctacccaagtcagttcatctcctgtgactcctgaaggtaccaccatgccaatctggacgcctagtgaaggaagcactccattaacaactatgcctgtcagcaccacacgtgtgaccagctctgagggtagcaccctttcaacaccttctgttgtcaccagcacacctgtgaccacttctactgaagccatttcatcttctgcaactcttgacagcaccaccatgtctgtgtcaatgcccatggaaataagcacccttgggaccactattcttgtcagtaccacacctgttacgaggtttcctgagagtagcaccccttccataccatctgtttacaccagcatgtctatgaccactgcctctgaaggcagttcatctcctacaactcttgaaggcaccaccaccatgcctatgtcaactacgagtgaaagaagcactttattgacaactgtcctcatcagccctatatctgtgatgagtccttctgaggccagcacactttcaacacctcctggtgataccagcacacctttgctcacctctaccaaagccggttcattctccatacctgctgaagtcactaccatacgtatttcaattaccagtgaaagaagcactccattaacaactctccttgtcagcaccacacttccaactagctttcctggggccagcatagcttcgacacctcctcttgacacaagcacaacttttaccccttctactgacactgcctcaactcccacaattcctgtagccaccaccatatctgtatcagtgatcacagaaggaagcacacctgggacaaccatttttattcccagcactcctgtcaccagttctactgctgatgtctttcctgcaacaactggtgctgtatctacccctgtgataacttccactgaactaaacacaccatcaacctccagtagtagtaccaccacatctttttcaactactaaggaatttacaacacccgcaatgactactgcagctcccctcacatatgtgaccatgtctactgcccccagcacacccagaacaaccagcagaggctgcactacttctgcatcaacgctttctgcaaccagtacacctcacacctctacttctgtcaccacccgtcctgtgaccccttcatcagaatccagcaggccgtcaacaattacttctcacaccatcccacctacatttcctcctgctcactccagtacacctccaacaacctctgcctcctccacgactgtgaaccctgaggctgtcaccaccatgaccaccaggacaaaacccagcacacggaccacttccttccccacggtgaccaccaccgctgtccccacgaatactacaattaagagcaaccccacctcaactcctactgtgccaagaaccacaacatgctttggagatgggtgccagaatacggcctctcgctgcaagaatggaggcacctgggatgggctcaagtgccagtgtcccaacctctattatggggagttgtgtgaggaggtggtcagcagcattgacatagggccaccggagactatctctgcccaaatggaactgactgtgacagtgaccagtgtgaagttcaccgaagagctaaaaaaccactcttcccaggaattccaggagttcaaacagacattcacggaacagatgaatattgtgtattccgggatccctgagtatgtcggggtgaacatcacaaagctacgtcttggcagtgtggtggtggagcatgacgtcctcctaagaaccaagtacacaccagaatacaagacagtattggacaatgccaccgaagtagtgaaagagaaaatcacaaaagtgaccacacagcaaataatgattaatgatatttgctcagacatgatgtgtttcaacaccactggcacccaagtgcaaaacattacggtgacccagtacgaccctgaagaggactgccggaagatggccaaggaatatggagactacttcgtagtggagtaccgggaccagaagccatactgcatcagcccctgtgagcctggcttcagtgtctccaagaactgtaacctcggcaagtgccagatgtctctaagtggacctcagtgcctctgcgtgaccacggaaactcactggtacagtggggagacctgtaaccagggcacccagaagagtctggtgtacggcctcgtgggggcaggggtcgtgctgatgctgatcatcctggtagctctcctgatgctcgttttccgctccaagagagaggtgaaacggcaaaagtacagattgtctcagttatacaagtggcaagaagaggacagtggaccagctcctgggaccttccaaaacattggctttgacatctgccaagatgatgattccatccacctggagtccatctatagtaatttccagccctccttgagacacatagaccctgaaacaaagatccgaattcagaggcctcaggtaatgacgacatcattttaa

SEQ ID NO: 124 - DNA, 8487 bp, Homo sapiens
atgcccaagcgcgcgcactggggggccctctccgtggtgctgatcctgctttggggccatccgcgagtggcgctggcctgcccgcatccttgtgcctgctacgtccccagcgaggtccactgcacgttccgatccctggcttccgtgcccgctggcattgctaaacacgtggaaagaatcaatttggggtttaatagcatacaggccctgtcagaaacctcatttgcaggactgaccaagttggagctacttatgattcacggcaatgagatcccaagcatccccgatggagctttaagagacctcagctctcttcaggttttcaagttcagctacaacaagctgagagtgatcacaggacagaccctccagggtctctctaacttaatgaggctgcacattgaccacaacaagatcgagtttatccaccctcaagctttcaacggcttaacgtctctgaggctactccatttggaaggaaatctcctccaccagctgcaccccagcaccttctccacgttcacatttttggattatttcagactctccaccataaggcacctctacttagcagagaacatggttagaactcttcctgccagcatgcttcggaacatgccgcttctggagaatctttacttgcagggaaatccgtggacctgcgattgtgagatgagatggtttttggaatgggatgcaaaatccagaggaattctgaagtgtaaaaaggacaaagcttatgaaggcggtcagttgtgtgcaatgtgcttcagtccaaagaagttgtacaaacatgagatacacaagctgaaggacatgacttgtctgaagccttcaatagagtcccctctgagacagaacaggagcaggagtattgaggaggagcaagaacaggaagaggatggtggcagccagctcatcctggagaaattccaactgccccagtggagcatctctttgaatatgaccgacgagcacgggaacatggtgaacttggtctgtgacatcaagaaaccaatggatgtgtacaagattcacttgaaccaaacggatcctccagatattgacataaatgcaacagttgccttggactttgagtgtccaatgacccgagaaaactatgaaaagctatggaaattgatagcatactacagtgaagttcccgtgaagctacacagagagctcatgctcagcaaagaccccagagtcagctaccagtacaggcaggatgctgatgaggaagctctttactacacaggtgtgagagcccagattcttgcagaaccagaatgggtcatgcagccatccatagatatccagctgaaccgacgtcagagtacggccaagaaggtgctactttcctactacacccagtattctcaaacaatatccaccaaagatacaaggcaggctcggggcagaagctgggtaatgattgagcctagtggagctgtgcaaagagatcagactgtcctggaagggggtccatgccagttgagctgcaacgtgaaagcttctgagagtccatctatcttctgggtgcttccagatggctccatcctgaaagcgcccatggatgacccagacagcaagttctccattctcagcagtggctggctgaggatcaagtccatggagccatctgactcaggcttgtaccagtgcattgctcaagtgagggatgaaatggaccgcatggtatatagggtacttgtgcagtctccctccactcagccagccgagaaagacacagtgacaattggcaagaacccaggggagtcggtgacattgccttgcaatgctttagcaatacccgaagcccaccttagctggattcttccaaacagaaggataattaatgatttggctaacacatcacatgtatacatgttgccaaatggaactctttccatcccaaaggtccaagtcagtgacagtggttactacagatgtgtggctgtcaaccagcaaggggcagaccattttacggtgggaatcacagtgaccaagaaagggtctggcttgccatccaaaagaggcagacgcccaggtgcaaaggctctttccagagtcagagaagacatcgtggaggatgaagggggctcgggcatgggagatgaagagaacacttcaaggagacttctgcatccaaaggaccaagaggtgttcctcaaaacaaaggatgatgccatcaatggagacaagaaagccaagaaagggagaagaaagctgaaactctggaagcattcggaaaaagaaccagagaccaatgttgcagaaggtcgcagagtgtttgaatctagacgaaggataaacatggcaaacaaacagattaatccggagcgctgggctgatattttagccaaagtccgtgggaaaaatctccctaagggcacagaagtacccccattgattaaaaccacaagtcctccatccttgagtctagaagtcacaccaccttttcctgctatttctcccccctcagcatctcctgtgcagacagtaaccagtgctgaagaatcctcagcagatgtacctctacttggtgaagaagagcacgttttgggtaccatttcctcagccagcatggggctagaacacaaccacaatggagttattcttgttgaacctgaagtaacaagcacacctctggaggaagttgttgatgacctttccgagaagactgaggagataacttccactgaaggagacctgaaggggacagcagcccctacacttatatctgagccttatgaaccatctcctactctgcacacattagacacagtctatgaaaagcccacccatgaagagacggcaacagagggttggtctgcagcagatgttggatcgtcaccagagcccacatccagtgagtatgagcctccattggatgctgtctccttggctgagtctgagcccatgcaatactttgacccagatttggagactaagtcacaaccagatgaggataagatgaaagaagacacctttgcacaccttactccaacccccaccatctgggttaatgactccagtacatcacagttatttgaggattctactataggggaaccaggtgtcccaggccaatcacatctacaaggactgacagacaacatccaccttgtgaaaagtagtctaagcactcaagacaccttactgattaaaaagggtatgaaagagatgtctcagacactacagggaggaaatatgctagagggagaccccacacactccagaagttctgagagtgagggccaagagagcaaatccatcactttgcctgactccacactgggtataatgagcagtatgtctccagttaagaagcctgcggaaaccacagttggtaccctcctagacaaagacaccacaacagcaacaacaacaccaaggcaaaaagttgctccgtcatccaccatgagcactcacccttctcgaaggagacccaacgggagaaggagattacgccccaacaaattccgccaccggcacaagcaaaccccacccacaacttttgccccatcagagactttttctactcaaccaactcaagcacctgacattaagatttcaagtcaagtggagagttctctggttcctacagcttgggtggataacacagttaatacccccaaacagttggaaatggagaagaatgcagaacccacatccaagggaacaccacggagaaaacacgggaagaggccaaacaaacatcgatataccccttctacagtgagctcaagagcgtccggatccaagcccagcccttctccagaaaataaacatagaaacattgttactcccagttcagaaactatacttttgcctagaactgtttctctgaaaactgagggcccttatgattccttagattacatgacaaccaccagaaaaatatattcatcttaccctaaagtccaagagacacttccagtcacatataaacccacatcagatggaaaagaaattaaggatgatgttgccacaaatgttgacaaacataaaagtgacattttagtcactggtgaatcaattactaatgccataccaacttctcgctccttggtctccactatgggagaatttaaggaagaatcctctcctgtaggctttccaggaactccaacctggaatccctcaaggacggcccagcctgggaggctacagacaggcatacctgttaccacttctggggaaaatcttacagaccctccccttcttaaagagcttgaggatgtggatttcacttccgagtttttgtcctctttgacagtctccacaccatttcaccaggaagaagctggttcttccacaactctctcaagcataaaagtggaggtggcttcaagtcaggcagaaaccaccacccttgatcaagatcatcttgaaaccactgtggctattctcctttctgaaactagaccacagaatcacacccctactgctgcccggatgaaggagccagcatcctcgtccccatccacaattctcatgtctttgggacaaaccaccaccactaagccagcacttcccagtccaagaatatctcaagcatctagagattccaaggaaaatgttttcttgaattatgtggggaatccagaaacagaagcaaccccagtgaacaatgaaggaacacagcatatgtcagggccaaatgaattatcaacaccctcttccgaccaggatgcatttaacttgtctacaaagctggaattggaaaagcaagtatttggtagtaggagtctaccacgtggcccagatagccaacgccaggatggaagagttcatgcttctcatcaactaaccagagtccctgccaaacccatcctaccaacagcaacagtgaggctgcctgaaatgtccacacaaagcgcttccagatactttgtaacttcccagtcacctcgtcactggaccaacaaaccggaaataactacatatccttctggggctttgccagagaacaaacagtttacaactccaagattatcaagtacaacaattcctctcccattgcacatgtccaaacccagcattcctagtaagtttactgaccgaagaactgaccaattcaatggctactccaaagtgtttggaaataacaacatccctgaggcaagaaacccagttggaaagcctcccagtccaagaattcctcattattccaatggaagactccctttctttaccaacaagactctttcttttccacagttgggagtcacccggagaccccagatacccacttctcctgccccagtaatgagagagagaaaagttattccaggttcctacaacaggatacattcccatagcaccttccatctggactttggccctccggcacctccgttgttgcacactccgcagaccacgggatcaccctcaactaacttacagaatatccctatggtctcttccacccagagttctatctcctttataacatcttctgtccagtcctcaggaagcttccaccagagcagctcaaagttctttgcaggaggacctcctgcatccaaattctggtctcttggggaaaagccacaaatcctcaccaagtccccacagactgtgtccgtcaccgctgagacagacactgtgttcccctgtgaggcaacaggaaaaccaaagcctttcgttacttggacaaaggtttccacaggagctcttatgactccgaataccaggatacaacggtttgaggttctcaagaacggtaccttagtgatacggaaggttcaagtacaagatcgaggccagtatatgtgcaccgccagcaacctgcacggcctggacaggatggtggtcttgctttcggtcaccgtgcagcaacctcaaatcctagcctcccactaccaggacgtcactgtctacctgggagacaccattgcaatggagtgtctggccaaagggaccccagccccccaaatttcctggatcttccctgacaggagggtgtggcaaactgtgtcccccgtggagggccgcatcaccctgcacgaaaaccggaccctttccatcaaggaggcgtccttctcagacagaggcgtctataagtgcgtggccagcaatgcagccggggcggacagcctggccatccgcctgcacgtggcggcactgccccccgttatccaccaggagaagctggagaacatctcgctgcccccggggctcagcattcacattcactgcactgccaaggctgcgcccctgcccagcgtgcgctgggtgctcggggacggtacccagatccgcccctcgcagttcctccacgggaacttgtttgttttccccaacgggacgctctacatccgcaacctcgcgcccaaggacagcgggcgctatgagtgcgtggccgccaacctggtaggctccgcgcgcaggacggtgcagctgaacgtgcagcgtgcagcagccaacgcgcgcatcacgggcacctccccgcggaggacggacgtcaggtacggaggaaccctcaagctggactgcagcgcctcgggggacccctggccgcgcatcctctggaggctgccgtccaagaggatgatcgacgcgctcttcagttttgatagcagaatcaaggtgtttgccaatgggaccctggtggtgaaatcagtgacggacaaagatgccggagattacctgtgcgtagctcgaaataaggttggtgatgactacgtggtgctcaaagtggatgtggtgatgaaaccggccaagattgaacacaaggaggagaacgaccacaaagtcttctacgggggtgacctgaaagtggactgtgtggccaccgggcttcccaatcccgagatctcctggagcctcccagacgggagtctggtgaactccttcatgcagtcggatgacagcggtggacgcaccaagcgctatgtcgtcttcaacaatgggacactctactttaacgaagtggggatgagggaggaaggagactacacctgctttgctgaaaatcaggtcgggaaggacgagatgagagtcagagtcaaggtggtgacagcgcccgccaccatccggaacaagacttacttggcggttcaggtgccctatggagacgtggtcactgtagcctgtgaggccaaaggagaacccatgcccaaggtgacttggttgtccccaaccaacaaggtgatccccacctcctctgagaagtatcagatataccaagatggcactctccttattcagaaagcccagcgttctgacagcggcaactacacctgcttggtcaggaacagcgcgggagaggataggaagacggtgtggattcacgtcaacgtccagccacccaagatcaacggtaaccccaaccccatcaccactgtgcgggagatagcagccgggggcagtcggaaactgattgactgcaaagctgaaggcatccccaccccgagggtgttatgggcttttcccgagggtgtggttctgccagctccatactatggaaaccggatcactgtccatggcaacggttccctggacatcaggagtttgaggaagagcgactccgtccagctggtatgcatggcacgcaacgagggaggggaggccaggttgatcctgcagctcactgtcctggagcccatggagaaacccatcttccacgacccgatcagcgagaagatcacggccatggcgggccacaccatcagcctcaactgctctgccgcggggaccccgacacccagcctggtgtgggtccttcccaatggcaccgatctgcagagtggacagcagctgcagcgcttctaccacaaggctgacggcatgctacacattagcggtctctcctcggtggacgccggggcctaccgctgcgtggcccgcaatgccgctggccacacggagaggctggtctccctgaaggtgggactgaagccagaagcaaacaagcagtatcataacctggtcagcatcatcaatggtgagaccctgaagctcccctgcacccctcccggggctgggcagggacgtttctcctggacgctccccaatggcatgcatctggagggcccccaaaccctgggacgcgtttctcttctggacaatggcaccctcacggttcgtgaggcctcggtgtttgacaggggtacctatgtatgcaggatggagacggagtacggcccttcggtcaccagcatccccgtgattgtgatcgcctatcctccccggatcaccagcgagcccaccccggtcatctacacccggcccgggaacaccgtgaaactgaactgcatggctatggggattcccaaagctgacatcacgtgggagttaccggataagtcgcatctgaaggcaggggttcaggctcgtctgtatggaaacagatttcttcacccccagggatcactgaccatccagcatgccacacagagagatgccggcttctacaagtgcatggcaaaaaacattctcggcagtgactccaaaacaacttacatccacgtcttctga

SEQ ID NO: 125 - DNA, 2286 bp, Homo sapiens
atggcccgaagaccccggcacagcatatatagcagtgacgaggatgatgaggactttgagatgtgtgaccatgactatgatgggctgcttcccaagtctggaaagcgtcacttggggaaaacaaggtggacccgggaagaggatgaaaaactgaagaagctggtggaacagaatggaacagatgactggaaagttattgccaattatctcccgaatcgaacagatgtgcagtgccagcaccgatggcagaaagtactaaaccctgagctcatcaagggtccttggaccaaagaagaagatcagagagtgatagagcttgtacagaaatacggtccgaaacgttggtctgttattgccaagcacttaaaggggagaattggaaaacaatgtagggagaggtggcataaccacttgaatccagaagttaagaaaacctcctggacagaagaggaagacagaattatttaccaggcacacaagagactggggaacagatgggcagaaatcgcaaagctactgcctggacgaactgataatgctatcaagaaccactggaattctacaatgcgtcggaaggtcgaacaggaaggttatctgcaggagtcttcaaaagccagccagccagcagtggccacaagcttccagaagaacagtcatttgatgggttttgctcaggctccgcctacagctcaactccctgccactggccagcccactgttaacaacgactattcctattaccacatttctgaagcacaaaatgtctccagtcatgttccataccctgtagcgttacatgtaaatatagtcaatgtccctcagccagctgccgcagccattcagagacactataatgatgaagaccctgagaaggaaaagcgaataaaggaattagaattgctcctaatgtcaaccgagaatgagctaaaaggacagcaggtgctaccaacacagaaccacacatgcagctaccccgggtggcacagcaccaccattgccgaccacaccagacctcatggagacagtgcacctgtttcctgtttgggagaacaccactccactccatctctgccagcggatcctggctccctacctgaagaaagcgcctcgccagcaaggtgcatgatcgtccaccagggcaccattctggataatgttaagaacctcttagaatttgcagaaacactccaatttatagattctgattcttcatcatggtgtgatctcagcagttttgaattctttgaagaagcagatttttcacctagccaacatcacacaggcaaagccctacagcttcagcaaagagagggcaatgggactaaacctgcaggagaacctagcccaagggtgaacaaacgtatgttgagtgagagttcacttgacccacccaaggtcttacctcctgcaaggcacagcacaattccactggtcatccttcgaaaaaaacggggccaggccagccccttagccactggagactgtagctccttcatatttgctgacgtcagcagttcaactcccaagcgttcccctgtcaaaagcctacccttctctccctcgcagttcttaaacacttccagtaaccatgaaaactcagacttggaaatgccttctttaacttccacccccctcattggtcacaaattgactgttacaacaccatttcatagagaccagactgtgaaaactcaaaaggaaaatactgtttttagaaccccagctatcaaaaggtcaatcttagaaagctctccaagaactcctacaccattcaaacatgcacttgcagctcaagaaattaaatacggtcccctgaagatgctacctcagacaccctctcatctagtagaagatctgcaggatgtgatcaaacaggaatctgatgaatctggaattgttgctgagtttcaagaaaatggaccacccttactgaagaaaatcaaacaagaggtggaatctccaactgataaatcaggaaacttcttctgctcacaccactgggaaggggacagtctgaatacccaactgttcacgcagacctcgcctgtggcagatgcaccgaatattcttacaagctccgttttaatggcaccagcatcagaagatgaagacaatgttctcaaagcatttacagtacctaaaaacaggtccctggcgagccccttgcagccttgtagcagtacctgggaacctgcatcctgtggaaagatggaggagcagatgacatcttccagtcaagctcgtaaatacgtgaatgcattctcagcccggacgctggtcatgtga

SEQ ID NO: 126 - DNA, 1395 bp, Homo sapiens
atgccgagctgctccacgtccaccatgccgggcatgatctgcaagaacccagacctcgagtttgactcgctacagccctgcttctacccggacgaagatgacttctacttcggcggccccgactcgacccccccgggggaggacatctggaagaagtttgagctgctgcccacgcccccgctgtcgcccagccgtggcttcgcggagcacagctccgagcccccgagctgggtcacggagatgctgcttgagaacgagctgtggggcagcccggccgaggaggacgcgttcggcctggggggactgggtggcctcacccccaacccggtcatcctccaggactgcatgtggagcggcttctccgcccgcgagaagctggagcgcgccgtgagcgagaagctgcagcacggccgcgggccgccaaccgccggttccaccgcccagtccccgggagccggcgccgccagccctgcgggtcgcgggcacggcggggctgcgggagccggccgcgccggggccgccctgcccgccgagctcgcccacccggccgccgagtgcgtggatcccgccgtggtcttcccctttcccgtgaacaagcgcgagccagcgcccgtgcccgcagccccggccagtgccccggcggcgggccctgcggtcgcctcgggggcgggtattgccgccccagccggggccccgggggtcgcccctccgcgcccaggcggccgccagaccagcggcggcgaccacaaggccctcagtacctccggagaggacaccctgagcgattcagatgatgaagatgatgaagaggaagatgaagaggaagaaatcgacgtggtcactgtggagaagcggcgttcctcctccaacaccaaggctgtcaccacattcaccatcactgtgcgtcccaagaacgcagccctgggtcccgggagggctcagtccagcgagctgatcctcaaacgatgccttcccatccaccagcagcacaactatgccgccccctctccctacgtggagagtgaggatgcacccccacagaagaagataaagagcgaggcgtccccacgtccgctcaagagtgtcatccccccaaaggctaagagcttgagcccccgaaactctgactcggaggacagtgagcgtcgcagaaaccacaacatcctggagcgccagcgccgcaacgaccttcggtccagctttctcacgctcagggaccacgtgccggagttggtaaagaatgagaaggccgccaaggtggtcattttgaaaaaggccactgagtatgtccactccctccaggccgaggagcaccagcttttgctggaaaaggaaaaattgcaggcaagacagcagcagttgctaaagaaaattgaacacgctcggacttgctag

SEQ ID NO: 127 - DNA, 954 bp, Homo sapiens
atgcgacccgaccgcgctgaggctccaggaccgcccgccatggctgcaggaggtcccggcgcggggtctgcggccccggtctcctccacatcctcccttcccctggctgctctcaacatgcgagtgcggcgccgcctgtctctgttcttgaacgtgcggacacaggtggcggccgactggaccgcgctggcggaggagatggactttgagtacttggagatccggcaactggagacacaagcggaccccactggcaggctgctggacgcctggcagggacgccctggcgcctctgtaggccgactgctcgagctgcttaccaagctgggccgcgacgacgtgctgctggagctgggacccagcattgaggaggattgccaaaagtatatcttgaagcagcagcaggaggaggctgagaagcctttacaggtggccgctgtagacagcagtgtcccacggacagcagagctggcgggcatcaccacacttgatgaccccctggggcatatgcctgagcgtttcgatgccttcatctgctattgccccagcgacatccagtttgtgcaggagatgatccggcaactggaacagacaaactatcgactgaagttgtgtgtgtctgaccgcgatgtcctgcctggcacctgtgtctggtctattgctagtgagctcatcgaaaagaggttggctagaaggccacggggtgggtgccgccggatggtggtggttgtctctgatgattacctgcagagcaaggaatgtgacttccagaccaaatttgcactcagcctctctccaggtgcccatcagaagcgactgatccccatcaagtacaaggcaatgaagaaagagttccccagcatcctgaggttcatcactgtctgcgactacaccaacccctgcaccaaatcttggttctggactcgccttgccaaggccttgtccctgccctga

SEQ ID NO: 128 - DNA, 2961 bp, Homo sapiens
atgacactcctggggtctgagcattccttgctgattaggagcaagttcagatcagttttacagttaagacttcaacaaagaaggacccaggaacaactggctaaccaaggcataataccaccactgaaacgtccagctgaattccatgagcaaagaaaacatttggatagtgacaaggctaaaaattccctgaagcgcaaagccagaaacaggtgcaacagtgccgacttggttaatatgcacatactccaagcttccactgcagagaggtccattccaactgctcagatgaagctgaaaagagcccgactcgccgatgatctcaatgaaaaaattgctctacgaccagggccactggagctggtggaaaaaaacattcttcctgtggattctgctgtgaaagaggccataaaaggtaaccaggtgagtttctccaaatccacggatgcttttgcctttgaagaggacagcagcagcgatgggctttctccggatcagactcgaagtgaagacccccaaaactcagcgggatccccgccagacgctaaagcctcagataccccttcgacaggttctctggggacaaaccaggatcttgcttctggctcagaaaatgacagaaatgactcagcctcacagcccagccaccagtcagatgcggggaagcaggggcttggcccccccagcacccccatagccgtgcatgctgctgtaaagtccaaatccttgggtgacagtaagaaccgccacaaaaagcccaaggaccccaagccaaaggtgaagaagcttaaatatcaccagtacattcccccagaccagaaggcagagaagtcccctccacctatggactcagcctacgctcggctgctccagcaacagcagctgttcctgcagctccaaatcctcagccagcagcagcagcagcagcaacaccgattcagctacctagggatgcaccaagctcagcttaaggaaccaaatgaacagatggtcagaaatccaaactcttcttcaacgccactgagcaatacccccttgtctcctgtcaaaaacagtttttctggacaaactggtgtctcttctttcaaaccaggcccactcccacctaacctggatgatctgaaggtctctgaattaagacaacagcttcgaattcggggcttgcctgtgtcaggcaccaaaacggctctcatggaccggcttcgacccttccaggactgctctggcaacccagtgccgaactttggggatataacgactgtcacttttcctgtcacacccaacacgctgcccaattaccagtcttcctcttctaccagtgccctgtccaacggcttctaccactttggcagcaccagctccagccccccgatctccccagcctcctctgacctgtcagtcgctgggtccctgccggacaccttcaatgatgcctccccctccttcggcctgcacccgtccccagtccacgtgtgcacggaggaaagtctcatgagcagcctgaatgggggctctgttccttctgagctggatgggctggactccgagaaggacaagatgctggtggagaagcagaaggtgatcaatgaactcacctggaaactccagcaagagcagaggcaggtggaggagctgaggatgcagcttcagaagcagaaaaggaataactgttcagagaagaagccgctgcctttcctggctgcctccatcaagcaggaagaggctgtctccagctgtccttttgcatcccaagtacctgtgaaaagacaaagcagcagctcagagtgtcacccaccggcttgtgaagctgctcaactccagcctcttggaaatgctcattgtgtggagtcctcagatcaaaccaatgtactttcttccacatttctcagcccccagtgttcccctcagcattcaccgctgggggctgtgaaaagcccacagcacatcagtttgcccccatcacccaacaaccctcactttctgccctcatcctccggggcccagggagaagggcacagggtctcctcgcccatcagcagccaggtgtgcactgcacagaactcaggagcacacgatggccatcctccaagcttctctccccattcttccagcctccacccgcccttctctggagcccaagcagacagcagtcatggtgccgggggaaacccttgtcccaaaagcccatgtgtacagcaaaagatggctggtttacactcttctgataaggtggggccaaagttttcaattccatccccaactttttctaagtcaagttcagcaatttcagaggtaacacagcctccatcctatgaagatgccgtaaagcagcaaatgacccggagtcagcagatggatgaactcctggacgtgcttattgaaagcggagaaatgccagcagacgctagagaggatcactcatgtcttcaaaaagtcccaaagatacccagatcttcccgaagtccaactgctgtcctcaccaagccctcggcttcctttgaacaagcctcttcaggcagccagatcccctttgatccctatgccaccgacagtgatgagcatcttgaagtcttattaaattcccagagccccctaggaaagatgagtgatgtcacccttctaaaaattgggagcgaagagcctcactttgatgggataatggatggattctctgggaaggctgcagaagacctcttcaatgcacatgagatcttgccaggccccctctctccaatgcagacacagttttcaccctcttctgtggacagcaatgggctgcagttaagcttcactgaatctccctgggaaaccatggagtggctggacctcactccgccaaattccacaccaggctttagcgccctcaccaccagcagccccagcatcttcaacatcgatttcctggatgtcactgatctcaatttgaattcttccatggaccttcacttgcagcagtggtag

SEQ ID NO: 129 - DNA, 7323 bp, Homo sapiens
atgtcaagttcaggttatcctcccaaccaaggagcattcagcacagaacaaagtcgttatcctcctcactctgtccagtatacatttcccaacacccgccaccagcaggagttcgcagtccctgattatcgttcctctcatcttgaagtgagtcaggcatcacagcttttgcagcaacagcagcagcaacagcttcgaaggcgaccttccttgctttcagaatttcacccaggttctgacaggcctcaagaaaggagaactagttatgaaccgtttcatccaggcccatccccagtggatcatgattcactggaatcgaagcgaccacgtctggaacaggtttctgattctcattttcagcgtgtcagtgctgcggttttgcctttagtgcacccgctgccagaagggctgagggcttctgcagatgctaagaaggatccagcattcggaggcaaacatgaagctccatcctctccaatttcggggcaaccatgtggagatgatcaaaatgcttcaccttcaaaactctcaaaggaagagttaatacagagtatggatcgtgtagatcgagaaattgcaaaagtagaacagcagatccttaaactgaaaaagaaacaacaacagcttgaagaagaggcagctaaacctcctgagcctgagaagcccgtgtcccctcctcctgtggagcagaaacaccgcagtattgtccaaattatttatgatgagaatcggaaaaaagcagaagaagctcataaaatttttgaaggtcttggcccaaaagttgaactgccactgtataaccagccatcagataccaaggtgtaccatgagaacatcaagacaaaccaggtgatgaggaaaaaactcattttattttttaaaagaagaaatcatgcaagaaaacaaagggaacaaaaaatctgccagcgttatgatcagctcatggaggcatgggagaaaaaagtggacagaatagaaaataatcctcggaggaaagctaaagaaagcaaaacaagggaatactatgaaaagcagtttccagaaattcgaaaacaaagagaacagcaagaaagatttcagcgagttgggcagaggggagctggtctttcagccaccattgctaggagtgagcatgagatttctgaaattattgatgggctctctgagcaggagaataatgagaaacaaatgcggcagctctctgtgattccacctatgatgtttgatgcagaacaaagacgagtcaagttcattaacatgaatgggcttatggaggaccctatgaaagtgtataaagataggcagtttatgaatgtttggactgaccatgaaaaggagatctttaaggacaagtttatccagcatccaaaaaactttggactaattgcatcatacttggagaggaagagtgttcctgattgtgttttgtattactatttaaccaagaaaaatgagaattataaagccctcgtcagaaggaattatgggaaacgcagaggcagaaaccagcaaattgctcgaccctcgcaagaagaaaaagtagaagaaaaagaagaggataaagcagaaaaaacagaaaaaaaagaagaagaaaagaaagatgaagaggaaaaagatgaaaaagaagactccaaagaaaataccaaggaaaaggacaagatagatggtacagcagaagaaactgaggaaagagagcaagccacaccccgggggcgaaagactgccaacagtcagggccgccgtaagggccggatcaccaggtccatgacaaacgaagctgcagctgccagtgctgcagccgcagcggctactgaagagcccccaccacctctgccaccgccaccagaacccatttctacagagcctgtggagacctctcgatggacagaagaagaaatggaagttgctaaaaaaggtctagtagaacatggtcgtaactgggcagcaattgctaaaatggtgggaacgaaaagtgaagctcaatgtaaaaacttctattttaactataaaaggcgacacaatcttgacaacctcttacagcagcataaacagaaaacttcacgaaaacctcgtgaagagcgagatgtgtctcaatgtgaaagtgtcgcttccactgtttctgctcaggaggatgaagatattgaagcctccaatgaagaagaaaatccagaagacagcgaagttgaagctgtcaagcccagcgaggacagtcctgaaaatgctacttctcgaggaaacacagaacctgcggttgagcttgagcccaccacggaaactgcacccagtacatctccctccttagcagttccaagtacaaaaccagctgaagatgaaagtgtggagacccaggtgaatgacagcatcagtgctgagacagcagagcagatggatgtagatcagcaggagcacagtgctgaagagggttctgtttgtgatcccccacccgctaccaaagctgactctgtggacgttgaagtgagggtgccagaaaaccatgcatctaaagttgaaggtgataataccaaagaaagagacttggatagagccagtgagaaggtggaacctagagatgaagatttggtggtagctcagcaaataaatgcccaaaggcccgagccccagtcagacaatgattccagtgccacgtgcagcgctgatgaggatgtggatggagagccagagaggcagagaatgtttcctatggactcaaagccttcactgttaaaccccactggatctatactcgtctcatctccgttaaaaccaaatccactggatctgccacagcttcagcatcgagctgctgttatcccaccaatggtatcctgcaccccatgtaacataccaattggaaccccagtgagcggctatgctctctaccagcgacacattaaagcaatgcatgagtcagcactcctggaggagcagcggcagagacaagaacagatagatttggaatgtagaagttctacaagtccatgtggcacatccaagagtccaaacagagagtgggaagtccttcagcctgctccacatcaagtgataactaatctccctgaaggcgttcggcttccgacaactcgaccaaccaggccaccgccccctctcatcccgtcatccaaaaccacagtggcttcagaaaaaccatcttttataatgggaggctccatctcacagggaacaccaggcacttatttgacttctcataatcaggcttcctacactcaagaaacacccaagccgtcagtgggatctatctctcttggactgccacggcaacaggaatctgccaaatcagctactttgccctacatcaagcaggaagaattttctccccgaagccaaaactcacaacctgagggtctgttggtcagggcccaacatgaaggtgtagtcagaggtaccgcaggagccatacaagaaggaagtataactcggggaactccaaccagcaaaatttcagtggagagcattccatccctacggggctctatcactcagggcaccccggctctgccccagactggcataccaacagaggctttggtgaaggggtccatttcgagaatgcccattgaagacagcagtcctgagaaaggcagagaggaagctgcatccaaaggccatgttatttatgaaggcaaaagtggacatatcttgtcatatgataatattaagaatgcccgagaagggactaggagtccaagaacagctcatgaaatcagtttaaagagaagctatgaatcagtggaaggaaatataaagcaagggatgtcaatgagggagtctcctgtatcagcaccgttagaggggctgatatgccgagcattacccagggggagtcctcattctgacctcaaagaaaggactgtattgtctggctccataatgcaggggacaccaagagcaacaactgaaagctttgaagatggccttaaatatcccaaacaaattaaaagggaaagtcctcccatacgagcatttgaaggtgccattaccaaaggaaaaccatatgatggcatcaccaccatcaaagaaatggggcgttccattcatgagattccaaggcaagatattttaactcaggaaagtcggaaaactccagaagtggtccagagcacacggccgataattgagggttccatttcccagggcacaccaataaagtttgacaacaactcaggtcaatctgccatcaaacacaatgtcaaatccttaatcacggggcctagcaaactatcccgtggaatgcctccgctggaaattgtgccagagaacataaaagtggtagaacggggaaaatatgaggatgtgaaagcaggcgagaccgtgcgttcccggcacacgtcagtggtaagctctggcccctccgttcttaggtccacactgcatgaagctcccaaagcacaactgagccctgggatttatgatgacaccagtgcacggaggacccctgtgagttatcaaaacaccatgtccagaggctcacccatgatgaacagaacttctgatgttacaatttcttctaacaagtctaccaatcatgaaaggaaatcgacactgacccctacccagagggaaagtatcccagcgaagtctccagtgcctggggtggaccctgtcgtgagccacagtccgtttgatccccatcacagaggcagcactgcaggcgaggtttatcggagccacctgcccacgcacttggatccagccatgccttttcacagggctttggatcctgcagcggctgcttacctgtttcagagacagctttcaccaactccaggttacccaagtcagtatcagctttacgcaatggagaacacaagacagacaatcttaaatgattacattacctcacaacagatgcaagtgaacttgcgtccagatgtggccagaggactctccccaagagagcagccactgggtctcccatacccagcaacgagaggaatcattgacctgaccaatatgcctccaacaattttagtgcctcatccagggggaacaagcactcctcccatggacagaatcacttatattcctggtacacagattactttccctcccaggccgtacaactctgcttccatgtctccaggacacccaacacaccttgcagctgctgcaagtgctgagagggaacgggaacgggagcgggagaaggagcgggagcgggaacggattgctgcagcttcctccgacctctacctgcggccaggctcagaacagcctggccgacctggcagtcatggatatgttcgctccccttccccttcagtaagaactcaggagaccatgttgcaacagagacccagtgttttccaaggaaccaatggaaccagtgtaatcacacctttggatccaactgctcagctacgaatcatgccactgcctgctgggggcccttcaataagccaaggcctgccagcctcccgttacaacactgctgcggatgccctggctgctcttgtggatgctgcagcttctgcaccccagatggatgtgtccaaaacaaaagagagtaagcatgaagctgccaggttagaagaaaatttgagaagcaggtcagcagcagttagtgaacagcagcagctagagcagaaaaccctggaggtggagaagagatctgttcagtgtttatacacttcttcagcctttccaagtggcaagccccagcctcattcttcagtagtttattctgaggctgggaaagataaagggcctcctccaaaatccagatatgaggaagagctaaggaccagagggaagactaccattactgcagctaacttcatagacgtgatcatcacccggcaaattgcctcggacaaggatgcgagggaacgtggctctcaaagttcagactcttctagtagcttatcttctcacaggtatgaaacacctagcgatgctattgaggtgataagtcctgccagctcacctgcgccaccccaggagaaactgcagacctatcagccagaggttgttaaggcaaatcaagcggaaaatgatcctaccagacaatatgaaggaccattacatcactatcgaccacagcaggaatcaccatctccccaacaacagctgcccccttcttcacaggcagagggaatggggcaagtgcccaggacccatcggctgatcacacttgctgatcacatctgtcaaattatcacacaagattttgctagaaatcaagtttcctcgcagactccccagcagcctcctacttctacattccagaactcaccttctgctttggtatctacacctgtgaggactaaaacatcaaaccgttacagcccagaatcccaggctcagtctgtccatcatcaaagaccaggttcaagggtctctccagaaaatcttgtggacaaatccaggggaagtaggcctggaaaatccccagagaggagtcacgtctcttcggagccctacgagcccatctccccaccccaggttccggttgtgcatgagaaacaggacagcttgctgctcttgtctcagaggggcgcagagcctgcagagcagaggaatgatgcccgctcaccagggagtataagctacttgccttcattcttcaccaagcttgaaaatacatcacccatggttaaatcaaagaagcaggagatttttcgtaagttgaactcctctggtggaggtgactctgatatggcagctgctcagccaggaactgagatctttaatctgccagcagttactacgtcaggctcagttagctctagaggccattcttttgctgatcctgccagtaatcttgggctggaagacattatcaggaaggctctcatgggaagctttgatgacaaagttgaggatcatggagttgtcatgtcccagcctatgggagtagtgcctggtactgccaacacctcagttgtgaccagtggtgagacacgaagagaggaaggggacccatcacctcattcaggaggagtttgcaaaccaaagctgatcagcaagtcaaacagcaggaaatctaagtctcctatacctgggcaaggctacttaggaacggaacggccctcttcagtctcctctgtacattcagaaggggattaccataggcagacgccagggtgggcctgggaagacaggccctcttcaacaggctcaactcagtttccttataaccctctgactatgcggatgctcagcagtactccaccaacaccgattgcatgtgctccctctgcggtgaaccaagcagctcctcaccaacagaacaggatctgggagcgagagcctgccccactgctctcagcacagtacgagaccctgtcggatagtgatgactga

SEQ ID NO: 130 - DNA, 8520 bp, Homo sapiens
atggccgcgcacaggccggtggaatgggtccaggccgtggtcagccgcttcgacgagcagcttccaataaaaacaggacagcagaacacacataccaaagtcagtactgagcacaacaaggaatgtctaatcaatatttccaaatacaagttttctttggttataagcggcctcactactattttaaagaatgttaacaatatgagaatatttggagaagctgctgaaaaaaatttatatctctctcagttgattatattggatacactggaaaaatgtcttgctgggcaaccaaaggacacaatgagattagatgaaacgatgctggtcaaacagttgctgccagaaatctgccattttcttcacacctgtcgtgaaggaaaccagcatgcagctgaacttcggaattctgcctctggggttttattttctctcagctgcaacaacttcaatgcagtctttagtcgcatttctaccaggttacaggaattaactgtttgttcagaagacaatgttgatgttcatgatatagaattgttacagtatatcaatgtggattgtgcaaaattaaaacgactcctgaaggaaacagcatttaaatttaaagccctaaagaaggttgcgcagttagcagttataaatagcctggaaaaggcattttggaactgggtagaaaattatccagatgaatttacaaaactgtaccagatcccacagactgatatggctgaatgtgcagaaaagctatttgacttggtggatggttttgctgaaagcaccaaacgtaaagcagcagtttggccactacaaatcattctccttatcttgtgtccagaaataatccaggatatatccaaagacgtggttgatgaaaacaacatgaataagaagttatttctggacagtctacgaaaagctcttgctggccatggaggaagtaggcagctgacagaaagtgctgcaattgcctgtgtcaaactgtgtaaagcaagtacttacatcaattgggaagataactctgtcattttcctacttgttcagtccatggtggttgatcttaagaacctgctttttaatccaagtaagccattctcaagaggcagtcagcctgcagatgtggatctaatgattgactgccttgtttcttgctttcgtataagccctcacaacaaccaacactttaagatctgcctggctcagaattcaccttctacatttcactatgtgctggtaaattcactccatcgaatcatcaccaattccgcattggattggtggcctaagattgatgctgtgtattgtcactcggttgaacttcgaaatatgtttggtgaaacacttcataaagcagtgcaaggttgtggagcacacccagcaatacgaatggcaccgagtcttacatttaaagaaaaagtaacaagccttaaatttaaagaaaaacctacagacctggagacaagaagctataagtatcttctcttgtccatggtgaaactaattcatgcagatccaaagctcttgctttgtaatccaagaaaacaggggcccgaaacccaaggcagtacagcagaattaattacagggctcgtccaactggtccctcagtcacacatgccagagattgctcaggaagcaatggaggctctgctggttcttcatcagttagatagcattgatttgtggaatcctgatgctcctgtagaaacattttgggagattagctcacaaatgcttttttacatctgcaagaaattaactagtcatcaaatgcttagtagcacagaaattctcaagtggttgcgggaaatattgatctgcaggaataaatttcttcttaaaaataagcaggcagatagaagttcctgtcactttctccttttttacggggtaggatgtgatattccttctagtggaaataccagtcaaatgtccatggatcatgaagaattactacgtactcctggagcctctctccggaagggaaaagggaactcctctatggatagtgcagcaggatgcagcggaacccccccgatttgccgacaagcccagaccaaactagaagtggccctgtacatgtttctgtggaaccctgacactgaagctgttctggttgccatgtcctgtttccgccacctctgtgaggaagcagatatccggtgtggggtggatgaagtgtcagtgcataacctcttgcccaactataacacattcatggagtttgcctctgtcagcaatatgatgtcaacaggaagagcagcacttcagaaaagagtgatggcactgctgaggcgcattgagcatcccactgcaggaaacactgaggcttgggaagatacacatgcaaaatgggaacaagcaacaaagctaatccttaactatccaaaagccaaaatggaagatggccaggctgctgaaagccttcacaagaccattgttaagaggcgaatgtcccatgtgagtggaggaggatccatagatttgtctgacacagactccctacaggaatggatcaacatgactggcttcctttgtgcccttgggggagtgtgcctccagcagagaagcaattctggcctggcaacctatagcccacccatgggtccagtcagtgaacgtaagggttctatgatttcagtgatgtcttcagagggaaacgcagatacacctgtcagcaaatttatggatcggctgttgtccttaatggtgtgtaaccatgagaaagtgggacttcaaatacggaccaatgttaaggatctggtgggtctagaattgagtcctgctctgtatccaatgctatttaacaaattgaagaataccatcagcaagttttttgactcccaaggacaggttttattgactgataccaatactcaatttgtagaacaaaccatagctataatgaagaacttgctagataatcatactgaaggcagctctgaacatctagggcaagctagcattgaaacaatgatgttaaatctggtcaggtatgttcgtgtgcttgggaatatggtccatgcaattcaaataaaaacgaaactgtgtcaattagttgaagtaatgatggcaaggagagatgacctctcattttgccaagagatgaaatttaggaataagatggtagaatacctgacagactgggttatgggaacatcaaaccaagcagcagatgatgatgtaaaatgtcttacaagagatttggaccaggcaagcatggaagcagtagtttcacttctagctggtctccctctgcagcctgaagaaggagatggtgtggaattgatggaagccaaatcacagttatttcttaaatacttcacattatttatgaaccttttgaatgactgcagtgaagttgaagatgaaagtgcgcaaacaggtggcaggaaacgtggcatgtctcggaggctggcatcactgaggcactgtacggtccttgcaatgtcaaacttactcaatgccaacgtagacagtggtctcatgcactccataggcttaggttaccacaaggatctccagacaagagctacatttatggaagttctgacaaaaatccttcaacaaggcacagaatttgacacacttgcagaaacagtattggctgatcggtttgagagattggtggaactggtcacaatgatgggtgatcaaggagaactccctatagcgatggctctggccaatgtggttccttgttctcagtgggatgaactagctcgagttctggttactctgtttgattctcggcatttactctaccaactgctctggaacatgttttctaaagaagtagaattggcagactccatgcagactctcttccgaggcaacagcttggccagtaaaataatgacattctgtttcaaggtatatggtgctacctatctacaaaaactcctggatcctttattacgaattgtgatcacatcctctgattggcaacatgttagctttgaagtggatcctaccaggttagaaccatcagagagccttgaggaaaaccagcggaacctccttcagatgactgaaaagttcttccatgccatcatcagttcctcctcagaattcccccctcaacttcgaagtgtgtgccactgtttataccaggcaacttgccactccctactgaataaagctacagtaaaagaaaaaaaggaaaacaaaaaatcagtggttagccagcgtttccctcagaacagcatcggtgcagtaggaagtgccatgttcctcagatttatcaatcctgccattgtctcaccgtatgaagcagggattttagataaaaagccaccacctagaatcgaaaggggcttgaagttaatgtcaaagatacttcagagtattgccaatcatgttctcttcacaaaagaagaacatatgcggcctttcaatgattttgtgaaaagcaactttgatgcagcacgcaggtttttccttgatatagcatctgattgtcctacaagtgatgcagtaaatcatagtctttccttcataagtgacggcaatgtgcttgctttacatcgtctactctggaacaatcaggagaaaattgggcagtatctttccagcaacagggatcataaagctgttggaagacgaccttttgataagatggcaacacttcttgcatacctgggtcctccagagcacaaacctgtggcagatacacactggtccagccttaaccttaccagttcaaagtttgaggaatttatgactaggcatcaggtacatgaaaaagaagaattcaaggctttgaaaacgttaagtattttctaccaagctgggacttccaaagctgggaatcctattttttattatgttgcacggaggttcaaaactggtcaaatcaatggtgatttgctgatataccatgtcttactgactttaaagccatattatgcaaagccatatgaaattgtagtggaccttacccataccgggcctagcaatcgctttaaaacagactttctctctaagtggtttgttgtttttcctggctttgcttacgacaacgtctccgcagtctatatctataactgtaactcctgggtcagggagtacaccaagtatcatgagcggctgctgactggcctcaaaggtagcaaaaggcttgttttcatagactgtcctgggaaactggctgagcacatagagcatgaacaacagaaactacctgctgccaccttggctttagaagaggacctgaaggtattccacaatgctctcaagctagctcacaaagacaccaaagtttctattaaagttggttctactgctgtccaagtaacttcagcagagcgaacaaaagtcctagggcaatcagtctttctaaatgacatttattatgcttcggaaattgaagaaatctgcctagtagatgagaaccagttcaccttaaccattgcaaaccagggcacgccgctcaccttcatgcaccaggagtgtgaagccattgtccagtctatcattcatatccggacccgctgggaactgtcacagcccgactctatcccccaacacaccaagattcggccaaaagatgtccctgggacactgctcaatatcgcattacttaatttaggcagttctgacccgagtttacggtcagctgcctataatcttctgtgtgccttaacttgtacctttaatttaaaaatcgagggccagttactagagacatcaggtttatgtatccctgccaacaacaccctctttattgtctctattagtaagacactggcagccaatgagccacacctcacgttagaatttttggaagagtgtatttctggatttagcaaatctagtattgaattgaaacacctttgtttggaatacatgactccatggctgtcaaatctagttcgtttttgcaagcataatgatgatgccaaacgacaaagagttactgctattcttgacaagctgataacaatgaccatcaatgaaaaacagatgtacccatctattcaagcaaaaatatggggaagccttgggcagattacagatctgcttgatgttgtactagacagtttcatcaaaaccagtgcaacaggtggcttgggatcaataaaagctgaggtgatggcagatactgctgtagctttggcttctggaaatgtgaaattggtttcaagcaaggttattggaaggatgtgcaaaataattgacaagacatgcttatctccaactcctactttagaacaacatcttatgtgggatgatattgctattttagcacgctacatgctgatgctgtccttcaacaattcccttgatgtggcagctcatcttccctacctcttccacgttgttactttcttagtagccacaggtccgctctcccttagagcttccacacatggactggtcattaatatcattcactctctgtgtacttgttcacagcttcattttagtgaagagaccaagcaagttttgagactcagtctgacagagttctcattacccaaattttacttgctgtttggcattagcaaagtcaagtcagctgctgtcattgccttccgttccagttaccgggacaggtcattctctcctggctcctatgagagagagacttttgctttgacatccttggaaacagtcacagaagctttgttggagatcatggaggcatgcatgagagatattccaacgtgcaagtggctggaccagtggacagaactagctcaaagatttgcattccaatataatccatccctgcaaccaagagctcttgttgtctttgggtgtattagcaaacgagtgtctcatgggcagataaagcagataatccgtattcttagcaaggcacttgagagttgcttaaaaggacctgacacttacaacagtcaagttctgatagaagctacagtaatagcactaaccaaattacagccacttcttaataaggactcgcctctgcacaaagccctcttttgggtagctgtggctgtgctgcagcttgatgaggtcaacttgtattcagcaggtaccgcacttcttgaacaaaacctgcatactttagatagtctccgtatattcaatgacaagagtccagaggaagtatttatggcaatccggaatcctctggagtggcactgcaagcaaatggatcattttgttggactcaatttcaactctaactttaactttgcattggttggacaccttttaaaagggtacaggcatccttcacctgctattgttgcaagaacagtcagaattttacatacactactaactctggttaacaaacacagaaattgtgacaaatttgaagtgaatacacagagcgtggcctacttagcagctttacttacagtgtctgaagaagttcgaagtcgctgcagcctaaaacatagaaagtcacttcttcttactgatatttcaatggaaaatgttcctatggatacatatcccattcatcatggtgacccttcctataggacactaaaggagactcagccatggtcctctcccaaaggttctgaaggataccttgcagccacctatccaactgtcggccagaccagtccccgagccaggaaatccatgagcctggacatggggcaaccttctcaggccaacactaagaagttgcttggaacaaggaaaagttttgatcacttgatatcagacacaaaggctcctaaaaggcaagaaatggaatcagggatcacaacaccccccaaaatgaggagagtagcagaaactgattatgaaatggaaactcagaggatttcctcatcacaacagcacccacatttacgtaaagtttcagtgtctgaatcaaatgttctcttggatgaagaagtacttactgatccgaagatccaggcgctgcttcttactgttctagctacactggtaaaatataccacagatgagtttgatcaacgaattctttatgaatacttagcagaggccagtgttgtgtttcccaaagtctttcctgttgtgcataatttgttggactctaagatcaacaccctgttatcattgtgccaagatccaaatttgttaaatccaatccatggaattgtgcagagtgtggtgtaccatgaagaatccccaccacaataccaaacatcttacctgcaaagttttggttttaatggcttgtggcggtttgcaggaccgttttcaaagcaaacacaaattccagactatgctgagcttattgttaagtttcttgatgccttgattgacacgtacctgcctggaattgatgaagaaaccagtgaagaatccctcctgactcccacatctccttaccctcctgcactgcagagccagcttagtatcactgccaaccttaacctttctaattccatgacctcacttgcaacttcccagcattccccaggaatcgacaaggagaacgttgaactctcccctaccactggccactgtaacagtggacgaactcgccacggatccgcaagccaagtgcagaagcaaagaagcgctggcagtttcaaacgtaatagcattaagaagatcgtgtga

SEQ ID NO: 131 - DNA, 1818 bp, Homo sapiens
atgatggacttggagctgccgccgccgggactcccgtcccagcaggacatggatttgattgacatactttggaggcaagatatagatcttggagtaagtcgagaagtatttgacttcagtcagcgacggaaagagtatgagctggaaaaacagaaaaaacttgaaaaggaaagacaagaacaactccaaaaggagcaagagaaagcctttttcgctcagttacaactagatgaagagacaggtgaatttctcccaattcagccagcccagcacatccagtcagaaaccagtggatctgccaactactcccaggttgcccacattcccaaatcagatgctttgtactttgatgactgcatgcagcttttggcgcagacattcccgtttgtagatgacaatgaggtttcttcggctacgtttcagtcacttgttcctgatattcccggtcacatcgagagcccagtcttcattgctactaatcaggctcagtcacctgaaacttctgttgctcaggtagcccctgttgatttagacggtatgcaacaggacattgagcaagtttgggaggagctattatccattcctgagttacagtgtcttaatattgaaaatgacaagctggttgagactaccatggttccaagtccagaagccaaactgacagaagttgacaattatcatttttactcatctataccctcaatggaaaaagaagtaggtaactgtagtccacattttcttaatgcttttgaggattccttcagcagcatcctctccacagaagaccccaaccagttgacagtgaactcattaaattcagatgccacagtcaacacagattttggtgatgaattttattctgctttcatagctgagcccagtatcagcaacagcatgccctcacctgctactttaagccattcactctctgaacttctaaatgggcccattgatgtttctgatctatcactttgcaaagctttcaaccaaaaccaccctgaaagcacagcagaattcaatgattctgactccggcatttcactaaacacaagtcccagtgtggcatcaccagaacactcagtggaatcttccagctatggagacacactacttggcctcagtgattctgaagtggaagagctagatagtgcccctggaagtgtcaaacagaatggtcctaaaacaccagtacattcttctggggatatggtacaacccttgtcaccatctcaggggcagagcactcacgtgcatgatgcccaatgtgagaacacaccagagaaagaattgcctgtaagtcctggtcatcggaaaaccccattcacaaaagacaaacattcaagccgcttggaggctcatctcacaagagatgaacttagggcaaaagctctccatatcccattccctgtagaaaaaatcattaacctccctgttgttgacttcaacgaaatgatgtccaaagagcagttcaatgaagctcaacttgcattaattcgggatatacgtaggaggggtaagaataaagtggctgctcagaattgcagaaaaagaaaactggaaaatatagtagaactagagcaagatttagatcatttgaaagatgaaaaagaaaaattgctcaaagaaaaaggagaaaatgacaaaagccttcacctactgaaaaaacaactcagcaccttatatctcgaagttttcagcatgctacgtgatgaagatggaaaaccttattctcctagtgaatactccctgcagcaaacaagagatggcaatgttttccttgttcccaaaagtaagaagccagatgttaagaaaaactag

SEQ ID NO: 132 - DNA, 7668 bp, Homo sapiens
atgccgccgctcctggcgcccctgctctgcctggcgctgctgcccgcgctcgccgcacgaggcccgcgatgctcccagcccggtgagacctgcctgaatggcgggaagtgtgaagcggccaatggcacggaggcctgcgtctgtggcggggccttcgtgggcccgcgatgccaggaccccaacccgtgcctcagcaccccctgcaagaacgccgggacatgccacgtggtggaccgcagaggcgtggcagactatgcctgcagctgtgccctgggcttctctgggcccctctgcctgacacccctggacaatgcctgcctcaccaacccctgccgcaacgggggcacctgcgacctgctcacgctgacggagtacaagtgccgctgcccgcccggctggtcagggaaatcgtgccagcaggctgacccgtgcgcctccaacccctgcgccaacggtggccagtgcctgcccttcgaggcctcctacatctgccactgcccacccagcttccatggccccacctgccggcaggatgtcaacgagtgtggccagaagcccgggctttgccgccacggaggcacctgccacaacgaggtcggctcctaccgctgcgtctgccgcgccacccacactggccccaactgcgagcggccctacgtgccctgcagcccctcgccctgccagaacgggggcacctgccgccccacgggcgacgtcacccacgagtgtgcctgcctgccaggcttcaccggccagaactgtgaggaaaatatcgacgattgtccaggaaacaactgcaagaacgggggtgcctgtgtggacggcgtgaacacctacaactgccgctgcccgccagagtggacaggtcagtactgtaccgaggatgtggacgagtgccagctgatgccaaatgcctgccagaacggcgggacctgccacaacacccacggtggctacaactgcgtgtgtgtcaacggctggactggtgaggactgcagcgagaacattgatgactgtgccagcgccgcctgcttccacggcgccacctgccatgaccgtgtggcctccttctactgcgagtgtccccatggccgcacaggtctgctgtgccacctcaacgacgcatgcatcagcaacccctgtaacgagggctccaactgcgacaccaaccctgtcaatggcaaggccatctgcacctgcccctcggggtacacgggcccggcctgcagccaggacgtggatgagtgctcgctgggtgccaacccctgcgagcatgcgggcaagtgcatcaacacgctgggctccttcgagtgccagtgtctgcagggctacacgggcccccgatgcgagatcgacgtcaacgagtgcgtctcgaacccgtgccagaacgacgccacctgcctggaccagattggggagttccagtgcatctgcatgcccggctacgagggtgtgcactgcgaggtcaacacagacgagtgtgccagcagcccctgcctgcacaatggccgctgcctggacaagatcaatgagttccagtgcgagtgccccacgggcttcactgggcatctgtgccagtacgatgtggacgagtgtgccagcaccccctgcaagaatggtgccaagtgcctggacggacccaacacttacacctgtgtgtgcacggaagggtacacggggacgcactgcgaggtggacatcgatgagtgcgaccccgacccctgccactacggctcctgcaaggacggcgtcgccaccttcacctgcctctgccgcccaggctacacgggccaccactgcgagaccaacatcaacgagtgctccagccagccctgccgccacgggggcacctgccaggaccgcgacaacgcctacctctgcttctgcctgaaggggaccacaggacccaactgcgagatcaacctggatgactgtgccagcagcccctgcgactcgggcacctgtctggacaagatcgatggctacgagtgtgcctgtgagccgggctacacagggagcatgtgtaacatcaacatcgatgagtgtgcgggcaacccctgccacaacgggggcacctgcgaggacggcatcaatggcttcacctgccgctgccccgagggctaccacgaccccacctgcctgtctgaggtcaatgagtgcaacagcaacccctgcgtccacggggcctgccgggacagcctcaacgggtacaagtgcgactgtgaccctgggtggagtgggaccaactgtgacatcaacaacaatgagtgtgaatccaacccttgtgtcaacggcggcacctgcaaagacatgaccagtggctacgtgtgcacctgccgggagggcttcagcggtcccaactgccagaccaacatcaacgagtgtgcgtccaacccatgtctgaaccagggcacgtgtattgacgacgttgccgggtacaagtgcaactgcctgctgccctacacaggtgccacgtgtgaggtggtgctggccccgtgtgcccccagcccctgcagaaacggcggggagtgcaggcaatccgaggactatgagagcttctcctgtgtctgccccacgggctggcaagggcagacctgtgaggtcgacatcaacgagtgcgttctgagcccgtgccggcacggcgcatcctgccagaacacccacggcggctaccgctgccactgccaggccggctacagtgggcgcaactgcgagaccgacatcgacgactgccggcccaacccgtgtcacaacgggggctcctgcacagacggcatcaacacggccttctgcgactgcctgcccggcttccggggcactttctgtgaggaggacatcaacgagtgtgccagtgacccctgccgcaacggggccaactgcacggactgcgtggacagctacacgtgcacctgccccgcaggcttcagcgggatccactgtgagaacaacacgcctgactgcacagagagctcctgcttcaacggtggcacctgcgtggacggcatcaactcgttcacctgcctgtgtccacccggcttcacgggcagctactgccagcacgatgtcaatgagtgcgactcacagccctgcctgcatggcggcacctgtcaggacggctgcggctcctacaggtgcacctgcccccagggctacactggccccaactgccagaaccttgtgcactggtgtgactcctcgccctgcaagaacggcggcaaatgctggcagacccacacccagtaccgctgcgagtgccccagcggctggaccggcctttactgcgacgtgcccagcgtgtcctgtgaggtggctgcgcagcgacaaggtgttgacgttgcccgcctgtgccagcatggagggctctgtgtggacgcgggcaacacgcaccactgccgctgccaggcgggctacacaggcagctactgtgaggacctggtggacgagtgctcacccagcccctgccagaacggggccacctgcacggactacctgggcggctactcctgcaagtgcgtggccggctaccacggggtgaactgctctgaggagatcgacgagtgcctctcccacccctgccagaacgggggcacctgcctcgacctccccaacacctacaagtgctcctgcccacggggcactcagggtgtgcactgtgagatcaacgtggacgactgcaatccccccgttgaccccgtgtcccggagccccaagtgctttaacaacggcacctgcgtggaccaggtgggcggctacagctgcacctgcccgccgggcttcgtgggtgagcgctgtgagggggatgtcaacgagtgcctgtccaatccctgcgacgcccgtggcacccagaactgcgtgcagcgcgtcaatgacttccactgcgagtgccgtgctggtcacaccgggcgccgctgcgagtccgtcatcaatggctgcaaaggcaagccctgcaagaatgggggcacctgcgccgtggcctccaacaccgcccgcgggttcatctgcaagtgccctgcgggcttcgagggcgccacgtgtgagaatgacgctcgtacctgcggcagcctgcgctgcctcaacggcggcacatgcatctccggcccgcgcagccccacctgcctgtgcctgggccccttcacgggccccgaatgccagttcccggccagcagcccctgcctgggcggcaacccctgctacaaccaggggacctgtgagcccacatccgagagccccttctaccgttgcctgtgccccgccaaattcaacgggctcttgtgccacatcctggactacagcttcgggggtggggccgggcgcgacatccccccgccgctgatcgaggaggcgtgcgagctgcccgagtgccaggaggacgcgggcaacaaggtctgcagcctgcagtgcaacaaccacgcgtgcggctgggacggcggtgactgctccctcaacttcaatgacccctggaagaactgcacgcagtctctgcagtgctggaagtacttcagtgacggccactgtgacagccagtgcaactcagccggctgcctcttcgacggctttgactgccagcgtgcggaaggccagtgcaaccccctgtacgaccagtactgcaaggaccacttcagcgacgggcactgcgaccagggctgcaacagcgcggagtgcgagtgggacgggctggactgtgcggagcatgtacccgagaggctggcggccggcacgctggtggtggtggtgctgatgccgccggagcagctgcgcaacagctccttccacttcctgcgggagctcagccgcgtgctgcacaccaacgtggtcttcaagcgtgacgcacacggccagcagatgatcttcccctactacggccgcgaggaggagctgcgcaagcaccccatcaagcgtgccgccgagggctgggccgcacctgacgccctgctgggccaggtgaaggcctcgctgctccctggtggcagcgagggtgggcggcggcggagggagctggaccccatggacgtccgcggctccatcgtctacctggagattgacaaccggcagtgtgtgcaggcctcctcgcagtgcttccagagtgccaccgacgtggccgcattcctgggagcgctcgcctcgctgggcagcctcaacatcccctacaagatcgaggccgtgcagagtgagaccgtggagccgcccccgccggcgcagctgcacttcatgtacgtggcggcggccgcctttgtgcttctgttcttcgtgggctgcggggtgctgctgtcccgcaagcgccggcggcagcatggccagctctggttccctgagggcttcaaagtgtctgaggccagcaagaagaagcggcgggagcccctcggcgaggactccgtgggcctcaagcccctgaagaacgcttcagacggtgccctcatggacgacaaccagaatgagtggggggacgaggacctggagaccaagaagttccggttcgaggagcccgtggttctgcctgacctggacgaccagacagaccaccggcagtggactcagcagcacctggatgccgctgacctgcgcatgtctgccatggcccccacaccgccccagggtgaggttgacgccgactgcatggacgtcaatgtccgcgggcctgatggcttcaccccgctcatgatcgcctcctgcagcgggggcggcctggagacgggcaacagcgaggaagaggaggacgcgccggccgtcatctccgacttcatctaccagggcgccagcctgcacaaccagacagaccgcacgggcgagaccgccttgcacctggccgcccgctactcacgctctgatgccgccaagcgcctgctggaggccagcgcagatgccaacatccaggacaacatgggccgcaccccgctgcatgcggctgtgtctgccgacgcacaaggtgtcttccagatcctgatccggaaccgagccacagacctggatgcccgcatgcatgatggcacgacgccactgatcctggctgcccgcctggccgtggagggcatgctggaggacctcatcaactcacacgccgacgtcaacgccgtagatgacctgggcaagtccgccctgcactgggccgccgccgtgaacaatgtggatgccgcagttgtgctcctgaagaacggggctaacaaagatatgcagaacaacagggaggagacacccctgtttctggccgcccgggagggcagctacgagaccgccaaggtgctgctggaccactttgccaaccgggacatcacggatcatatggaccgcctgccgcgcgacatcgcacaggagcgcatgcatcacgacatcgtgaggctgctggacgagtacaacctggtgcgcagcccgcagctgcacggagccccgctggggggcacgcccaccctgtcgcccccgctctgctcgcccaacggctacctgggcagcctcaagcccggcgtgcagggcaagaaggtccgcaagcccagcagcaaaggcctggcctgtggaagcaaggaggccaaggacctcaaggcacggaggaagaagtcccaggacggcaagggctgcctgctggacagctccggcatgctctcgcccgtggactccctggagtcaccccatggctacctgtcagacgtggcctcgccgccactgctgccctccccgttccagcagtctccgtccgtgcccctcaaccacctgcctgggatgcccgacacccacctgggcatcgggcacctgaacgtggcggccaagcccgagatggcggcgctgggtgggggcggccggctggcctttgagactggcccacctcgtctctcccacctgcctgtggcctctggcaccagcaccgtcctgggctccagcagcggaggggccctgaatttcactgtgggcgggtccaccagtttgaatggtcaatgcgagtggctgtcccggctgcagagcggcatggtgccgaaccaatacaaccctctgcgggggagtgtggcaccaggccccctgagcacacaggccccctccctgcagcatggcatggtaggcccgctgcacagtagccttgctgccagcgccctgtcccagatgatgagctaccagggcctgcccagcacccggctggccacccagcctcacctggtgcagacccagcaggtgcagccacaaaacttacagatgcagcagcagaacctgcagccagcaaacatccagcagcagcaaagcctgcagccgccaccaccaccaccacagccgcaccttggcgtgagctcagcagccagcggccacctgggccggagcttcctgagtggagagccgagccaggcagacgtgcagccactgggccccagcagcctggcggtgcacactattctgccccaggagagccccgccctgcccacgtcgctgccatcctcgctggtcccacccgtgaccgcagcccagttcctgacgcccccctcgcagcacagctactcctcgcctgtggacaacacccccagccaccagctacaggtgcctgagcaccccttcctcaccccgtcccctgagtcccctgaccagtggtccagctcgtccccgcattccaacgtctccgactggtccgagggcgtctccagccctcccaccagcatgcagtcccagatcgcccgcattccggaggccttcaagtaa

SEQ ID NO: 133 - DNA, 885 bp, Homo sapiens
atggaagattcgatggacatggacatgagccccctgaggccccagaactatcttttcggttgtgaactaaaggccgacaaagattatcactttaaggtggataatgatgaaaatgagcaccagttatctttaagaacggtcagtttaggggctggtgcaaaggatgagttgcacattgttgaagcagaggcaatgaattacgaaggcagtccaattaaagtaacactggcaactttgaaaatgtctgtacagccaacggtttcccttgggggctttgaaataacaccaccagtggtcttaaggttgaagtgtggttcagggccagtgcatattagtggacagcacttagtagctgtggaggaagatgcagagtcagaagatgaagaggaggaggatgtgaaactcttaagtatatctggaaagcggtctgcccctggaggtggtagcaaggttccacagaaaaaagtaaaacttgctgctgatgaagatgatgacgatgatgatgaagaggatgatgatgaagatgatgatgatgatgattttgatgatgaggaagctgaagaaaaagcgccagtgaagaaatctatacgagatactccagccaaaaatgcacaaaagtcaaatcagaatggaaaagactcaaaaccatcatcaacaccaagatcaaaaggacaagaatccttcaagaaacaggaaaaaactcctaaaacaccaaaaggacctagttctgtagaagacattaaagcaaaaatgcaagcaagtatagaaaaaggtggttctcttcccaaagtggaagccaaattcatcaattatgtgaagaattgcttccggatgactgaccaagaggctattcaagatctctggcagtggaggaagtctctttaa

SEQ ID NO: 134 - DNA, 570 bp, Homo sapiens
atgactgagtacaaactggtggtggttggagcaggtggtgttgggaaaagcgcactgacaatccagctaatccagaaccactttgtagatgaatatgatcccaccatagaggattcttacagaaaacaagtggttatagatggtgaaacctgtttgttggacatactggatacagctggacaagaagagtacagtgccatgagagaccaatacatgaggacaggcgaaggcttcctctgtgtatttgccatcaataatagcaagtcatttgcggatattaacctctacagggagcagattaagcgagtaaaagactcggatgatgtacctatggtgctagtgggaaacaagtgtgatttgccaacaaggacagttgatacaaaacaagcccacgaactggccaagagttacgggattccattcattgaaacctcagccaagaccagacagggtgttgaagatgctttttacacactggtaagagaaatacgccagtaccgaatgaaaaaactcaacagcagtgatgatgggactcagggttgtatgggattgccatgtgtggtgatgtaa

SEQ ID NO: 135 - DNA, 8091 bp, Homo sapiens
atggatcagacctgtgaactacccagaagaaattgtctgctgcccttttccaatccagtgaatttagatgcccctgaagacaaggacagccctttcggtaatggtcaatccaatttttctgagccacttaatgggtgtactatgcagttatcgactgtcagtggaacatcccaaaatgcttatggacaagattctccatcttgttacattccactgcggagactacaggatttggcctccatgatcaatgtagagtatttaaatgggtctgctgatggatcagaatcctttcaagaccctgaaaaaagtgattcaagagctcagacgccaattgtttgcacttccttgagtcctggtggtcctacagcacttgctatgaaacaggaaccctcttgtaataactcccctgaactccaggtaaaagtaacaaagactatcaagaatggctttctgcactttgagaattttacttgtgtggacgatgcagatgtagattctgaaatggacccagaacagccagtcacagaggatgagagtatagaggagatctttgaggaaactcagaccaatgccacctgcaattatgagactaaatcagagaatggtgtaaaagtggccatgggaagtgaacaagacagcacaccagagagtagacacggtgcagtcaaatcgccattcttgccattagctcctcagactgaaacacagaaaaataagcaaagaaatgaagtggacggcagcaatgaaaaagcagcccttctcccagcccccttttcactaggagacacaaacattacaatagaagagcaattaaactcaataaatttatcttttcaggatgatccagattccagtaccagtacattaggaaacatgctagaattacctggaacttcatcatcatctacttcacaggaattgccattttgtcaacctaagaaaaagtctacgccactgaagtatgaagttggagatctcatctgggcaaaattcaagagacgcccatggtggccctgcaggatttgttctgatccgttgattaacacacattcaaaaatgaaagtttccaaccggaggccctatcggcagtactacgtggaggcttttggagatccttctgagagagcctgggtggctggaaaagcaatcgtcatgtttgaaggcagacatcaattcgaagagctacctgtccttaggagaagagggaaacagaaagaaaaaggatataggcataaggttcctcagaaaattttgagtaaatgggaagccagtgttggacttgcagaacagtatgatgttcccaaggggtcaaagaaccgaaaatgtattcctggttcaatcaagttggacagtgaagaagatatgccatttgaagactgcacaaatgatcctgagtcagaacatgacctgttgcttaatggctgtttgaaatcactggcttttgattctgaacattctgcagatgagaaggaaaagccttgcgctaaatctcgagccagaaagagctctgataatccaaaaaggactagtgtgaaaaagggccacatacaatttgaagcacataaagatgaacggaggggaaagattccagagaaccttggcctaaactttatctctggggatatatctgatacgcaggcctctaatgaactttccaggatagcaaatagcctcacagggtccaacactgccccaggaagttttctgttttcttcctgtggaaaaaacactgcaaagaaagaatttgagacttcaaatggtgactctttattgggcttgcctgagggtgctttgatctcaaagtgttctcgagagaagaataaaccccaacgaagcctggtgtgtggttcaaaagtgaagctctgctatattggagcaggtgatgaggaaaagcgaagtgattccattagtatctgtaccacttctgatgatggaagcagtgacctggatcccatagaacacagctcagagtctgataacagtgtccttgaaattccagatgctttcgatagaacagagaacatgttatctatgcagaaaaatgaaaagataaagtattctaggtttgctgccacaaacactagggtaaaagcaaaacagaagcctctcattagtaactcacatacagaccacttaatgggttgtactaagagtgcagagcctggaaccgagacgtctcaggttaatctctctgatctgaaggcatctactcttgttcacaaaccccagtcagattttacaaatgatgctctctctccaaaattcaacctgtcatcaagcatatccagtgagaactcgttaataaagggtggggcagcaaatcaagctctattacattcgaaaagcaaacagcccaagttccgaagtataaagtgcaaacacaaagaaaatccagttatggcagaacccccagttataaatgaggagtgcagtttgaaatgctgctcttctgataccaaaggctctcctttggccagcatttctaaaagtgggaaagtggatggtctaaaactactgaacaatatgcatgagaaaaccagggattcaagtgacatagaaacagcagtggtgaaacatgttttatccgagttgaaggaactctcttacagatccttaggtgaggatgtcagtgactctggaacatcaaagccatcaaaaccattacttttctcttctgcttctagtcagaatcacatacctattgaaccagactacaaattcagtacattgctaatgatgttgaaagatatgcatgatagtaagacgaaggagcagcggttgatgactgctcaaaacctggtctcttaccggagtcctggtcgtggggactgttctactaatagtcctgtaggagtctctaaggttttggtttcaggaggctccacacacaattcagagaaaaagggagatggcactcagaactccgccaatcctagccctagtgggggtgactctgcattatctggcgagttgtctgcttccctacctggcttactgtccgacaagagagacctccctgcttctggtaaaagtcgttcagactgtgttactaggcgcaactgtggacgatcaaagccttcatccaaattgcgagatgctttttcagcccaaatggtaaagaacacagtgaaccgtaaagccttaaagaccgagcgcaaaagaaaactgaatcagcttccaagtgtgactcttgatgctgtactgcagggagaccgagaacgtggaggttcattgagaggtggggcagaagatcctagtaaagaggatccccttcagataatgggccacttaacaagtgaagatggtgaccatttttctgatgtgcatttcgatagcaaggttaagcaatctgatcctggtaaaatttctgaaaaaggactctcttttgaaaacggaaaaggcccagagctggactctgtaatgaacagtgagaatgatgaactcaatggtgtaaatcaagtggtgcctaaaaagcggtggcagcgtttaaaccaaaggcgcactaaacctcgtaagcgcatgaacagatttaaagagaaagaaaactctgagtgtgcctttagggtcttacttcctagtgaccctgtgcaggaggggcgggatgagtttccagagcatagaactccttcagcaagcatacttgaggaaccactgacagagcaaaatcatgctgactgcttagattcagctgggccacggttaaatgtttgtgataaatccagtgccagcattggtgacatggaaaaggagccaggaattcccagtttgacaccacaggctgagctccctgaaccagctgtgcggtcagagaagaaacgccttaggaagccaagcaagtggcttttggaatatacagaagaatatgatcagatatttgctcctaagaaaaaacaaaagaaggtacaggagcaggtgcacaaggtaagttcccgctgtgaagaggaaagccttctagcccgaggtcgatctagtgctcagaacaagcaggtggacgagaattctttgatttcaaccaaagaagagcctccagttcttgaaagggaggctccgtttttggagggccccttggctcagtcagaacttggaggtggacatgctgagttgccgcagctgaccttgtctgtgcctgtggctccggaagtctctccacggcctgcccttgagtctgaggaattgctagttaaaacgccaggaaattatgaaagtaaacgtcaaagaaaaccaactaagaaacttcttgaatccaatgatttagaccctggatttatgcccaagaagggggaccttggcctttctaaaaagtgctatgaagctggtcacctggagaatggcataactgaatcttgtgccacatcttattcaaaagattttggtggaggcactaccaagatatttgacaagccaaggaagcgaaaacgacagaggcatgctgcagccaagatgcagtgtaaaaaagtgaaaaatgatgactcgtcaaaagagattccaggctcagagggagaactaatgcctcacaggacggccacaagccccaaggagactgttgaggaaggtgtagaacacgatcccgggatgcctgcctctaaaaaaatgcagggtgaacgcggtggaggagctgcactcaaggagaatgtctgtcagaattgtgaaaaattgggtgagctgctgttatgtgaggctcagtgctgtggggctttccacctggagtgccttggattgactgagatgccaagaggaaaatttatctgcaatgaatgtcgcacaggaatccatacctgttttgtatgtaagcagagtggggaagatgttaaaaggtgccttctacccttgtgtggaaagttttaccatgaagagtgtgtccagaagtacccacccactgttatgcagaacaagggcttccggtgctccctccacatctgtataacctgtcatgctgctaatccagccaatgtttctgcatctaaaggtcggttgatgcgctgtgtccgctgtcctgtggcataccacgccaatgacttttgcctggctgctgggtcaaagatccttgcatctaatagtatcatctgccctaatcactttacccctaggcggggctgccgaaatcatgagcatgttaatgttagctggtgctttgtgtgctcagaaggaggcagccttctgtgctgtgattcttgccctgctgcttttcatcgtgaatgcctgaacattgatatccctgaaggaaactggtattgcaatgactgtaaagcaggcaaaaagccacactacagggagattgtctgggtaaaagttggacgatacaggtggtggccagctgagatctgccatcctcgagctgttccttccaacattgataagatgagacatgatgtgggagagttcccagtcctcttttttggatctaatgactatttgtggactcaccaggcccgagtcttcccttacatggagggtgacgtgagcagcaaggataagatgggcaaaggagtggatgggacatataaaaaagctcttcaggaagctgcagcaaggtttgaggaattaaaggcccaaaaagagctaagacagctgcaggaagaccgaaagaatgacaagaagccaccaccttataaacatataaaggtaaaccgtcctattggcagggtacagatcttcactgcagacttatctgaaataccccgttgcaactgtaaagctactgatgagaacccctgtgggatagactctgaatgcatcaaccgcatgctgctctatgagtgccaccccacagtgtgtcctgccggagggcgctgtcaaaaccagtgcttttccaagcgccaatatccagaggttgaaattttccgcacattacagcggggttggggtctacggacaaaaacagatattaaaaagggtgaatttgtgaatgagtatgtgggtgagcttatagatgaagaagaatgcagagctcgaattcgctatgctcaagaacatgatatcactaatttctatatgctcaccctagacaaagaccgaatcattgatgctggtcccaaaggaaactatgctcggttcatgaatcattgctgccagcccaactgtgaaacacagaagtggtctgtgaatggagatacccgtgtaggcctttttgcactaagtgacattaaagcaggcactgaacttaccttcaactacaacctagaatgtcttgggaatggaaagactgtttgcaaatgtggagccccgaactgcagtggcttcttgggtgtaaggccaaagaatcaacccattgccacggaagaaaagtcaaagaaattcaagaagaagcaacagggaaagcgcaggacccagggtgaaatcacaaaggagcgagaagatgagtgttttagttgtggggatgctggccagctcgtctcctgcaagaaaccaggctgcccaaaagtttaccacgcagactgtctcaatctgaccaagcgaccagcagggaaatgggaatgtccgtggcatcagtgtgacatctgcgggaaggaagcagcctccttctgtgagatgtgccccagctccttttgtaagcagcatcgagaagggatgcttttcatttccaaactggatgggcgtctgtcttgtactgagcatgacccctgtgggcccaatcctctggaacctggggagatccgtgagtatgtgcctcccccagtaccgctgcctccagggccaagcactcacctggcagagcaatcaacaggaatggctgctcaggcacccaaaatgtcagataaacctcctgctgacaccaaccagatgctgtcgctctccaaaaaagctctggcagggacttgtcagaggccattgctacctgaaagacctcttgagagaactgactccaggccccagcctttagataaggtcagagacctcgctgggtcagggaccaaatcccaatccttggtttccagccagaggccactggacaggccaccagcagtggcaggaccaagaccccagctaagcgacaaaccctctccagtgaccagcccaagctcctcaccctcagtcaggtcccaaccactggaaagacctctggggacggctgacccaaggctggataaatccataggtgctgccagcccaaggccccagtcactggagaaaacctcagttcccactggcctgagacttccgccgccagacagactgctcattactagcagtcccaaaccccagacttcagacaggcctactgacaaaccccatgcctctttgtcccagagactcccacctcctgagaaagtactatcagctgtggtccagacccttgtagctaaagaaaaagcactgaggcctgtggaccagaatactcagtcaaaaaatagagctgctttggtgatggatctcatagacctaactcctcgccagaaggagcgggcagcttcacctcatcaggtcacaccacaggctgatgagaagatgccagtgttggagtcaagttcatggcctgccagcaaaggtctggggcatatgccgagagctgttgagaaaggctgtgtgtcagatcctcttcagacatctgggaaagcagcagccccttcagaggacccctggcaagctgttaaatcactcacccaggccagacttctttctcagcctcctgccaaggcctttttatatgagccaacaactcaggcctcaggaagagcttctgcaggggctgagcagaccccagggcctcttagccaatccccgggcctggtgaagcaggcgaagcagatggtcggaggccagcaactacctgcacttgccgccaagagtgggcaatcttttaggtctctcgggaaggccccagcctccctccccactgaagaaaagaagttggtaaccacagagcaaagtccctgggccctgggaaaagcctcatcacgggcagggctctggcccatagtggctggacagacactggcacagtcttgctggtctgctgggagcacacagacattggcacagacttgctggtctcttggaagagggcaagaccccaaaccagagcaaaatacacttccagctcttaaccaggctccttccagtcacaagtgtgcagaatcagaacagaagtag

SEQ ID NO: 136 - DNA, 1887 bp, Homo sapiens
atggggagctgcgcgcggctgctgctgctctggggctgcacggtggtggccgcaggactgagtggagtagctggagtgagttcccgctgtgaaaaagcctgcaaccctcggatgggaaatttggctttggggcgaaaactctgggcagacaccacctgcggtcagaatgctaccgaactgtactgcttctacagtgagaacacggatctgacttgtcggcagcccaaatgtgacaagtgcaatgctgcctatcctcacctggctcacctgccatctgccatggcagactcatccttccggtttcctcgcacatggtggcagtctgcggaggatgtgcacagagaaaagatccagttagacctggaagctgaattctacttcactcacctaattgtgatgttcaagtcccccaggccggctgccatggtgctggaccgctcccaggactttgggaaaacatggaagccttataagtactttgcgactaactgctccgctacatttggcctggaagatgatgttgtcaagaagggcgctatttgtacttctaaatactccagtccttttccatgcactggaggagaggttattttcaaagctttgtcaccaccatacgatacagagaacccttacagtgccaaagttcaggagcagctgaagatcaccaaccttcgcgtgcagctgctgaaacgacagtcttgtccctgtcagagaaatgacctgaacgaagagcctcaacattttacacactatgcaatctatgatttcattgtcaagggcagctgcttctgcaatggccacgctgatcaatgcatacctgttcatggcttcagacctgtcaaggccccaggaacattccacatggtccatgggaagtgtatgtgtaagcacaacacagcaggcagccactgccagcactgtgccccgttatacaatgaccggccatgggaggcagctgatggcaaaacgggggctcccaacgagtgcagaacctgcaagtgtaatgggcatgctgatacctgtcacttcgacgttaatgtgtgggaggcatcagggaatcgtagtggtggtgtctgtgatgactgtcagcacaacacagaaggacagtattgccagaggtgcaagccaggcttctatcgtgacctgcggagacccttctcagctccagatgcttgcaaaccgtgttcctgccatccagtaggatcagctgtccttcctgccaactcagtgaccttctgcgaccccagcaatggtgactgcccttgcaagcctggggtggcagggcgacgttgtgacaggtgcatggtgggatactggggcttcggagactatggctgtcgaccatgtgactgtgcggggagctgtgaccctatcaccggagactgcatcagcagccacacagacatagactggtatcatgaagttcctgacttccgtcccgtgcacaataagagcgaaccagcctgggagtgggaggatgcgcaggggttttctgcacttctacactcaggtaaatgcgaatgtaaggaacagacattaggaaatgccaaggcattctgtggaatgaaatattcatatgtgctaaaaataaagattttatcagctcatgataaaggtactcatgttgaggtcaatgtgaagattaaaaaggtcttaaaatctaccaaactgaagattttccgaggaaagcgaacattatatccagaatcatggacggacagaggatgcacttgtccaatcctcaatcctggtttggaataccttgtagcaggacatgaggatataagaacaggcaaactaattgtgaatatgaaaagctttgtccagcactggaaaccttctcttggaagaaaagtcatggatattttaaaaagagagtgcaagtag

SEQ ID NO: 137 - DNA, 5667 bp, Homo sapiens
atgactggctgtccggcgtcatcaagacgccgaggcttcgggctctttttcttcttgcgtctacaccgcctcctgttgttgtttctggttttgcgtgggaccctggccaacaaacttaacgtgccacaggtgttgctacccttcggccgagagccaggccgggtgcctttcctgctggaggcccagcggggctgctacacttggcattccacccatcatgatgcagttactgttgagcctttatatgaaaatggcaccttgtgttcccaaaaagctgtactcattgctgaatctacgcaaccgatacgcctcagcagtattattcttgctcgagaaatagtgactgaccatgagctacgctgtgatgttaaggttgatgtgataaacagcattgaaattgtatctcgggcccgggaactttatgtagatgattcgccactggaactgatggtgagggcattggatgctgaaggaaatacttttagtagtttggcagggatgatgtttgagtggagcattgcccaggacaacgagtcagcaagagaagaactgtctagcaaaattaggattcttaaatactccgaagcagaatatgctcccccaatatatatagctgagatggaaaaagaggagaaacaaggagatgtgattttagtgtctgggattagaactggtgctgctgttgtaaaagttcgaattcatgaaccattctataagaaagtggcagcagccttaatacgtctgcttgttttggagaatatatttcttataccatcccatgatatttatctcttagtaggaacatatattaaataccaagttgcaaaaatggttcaagggagagtgacagaggtgaaatttcccctggaacattatatactggaattgcaagaccatagagttgcacttaacgggtctcattctgagaaagtggctatactggatgacaaaacagccatggtgactgcctcacaactgggccagactaatcttgtctttgtccataaaaatgttcatatgcgatctgtgtctggactcccaaattgcaccatatatgttgtagagcctggatttttaggtttcactgtccaacctggaaaccgatggagtctagaggtgggacaggtatatgtcattacagtagacgtctttgataaaagcagcacaaaggtctatatttcagataatctcaggattacatacgactttcctaaggagtactttgaagagcaactaactaccgtgaatggatcttaccatatagtaaaagccctgaaagatggtgttgtggtaataaatgcatccctgacctccatcatttaccagaataaagatattcagcctataaaatttctaatcaaacaccaacaagaagtgaagatttattttcccatcatgcttacacccaaatttctggcatttcctcatcatcctatgggaatgttatatcgttataaagtacaggtagagggtggcagtggcaactttacctggacttcttctaatgaaacagtggtcatagtaaccacgaaaggagtggtgactgcaggtcaggtcagggggaatagtactgttttggcccgagatgtacaaaatccctttcgatatggagaaattaagatacatgtcctgaaactgaacaaaatggaactgttaccatttcatgctgatgtggagattggccagattatagaaatacccattgcaatgtatcacataaataaagagaccaaagaagccatggcattcacagactgctctcatttatccttggatctgaacatggataaacaaggagtctttactcttctcaaagaaggtattcaaagacctggaccaatgcattgttccagtacacatatcgcagctaaatctcttggccatactctggtaacagtaagtgtgaatgaatgtgacaagtacttggagagcagtgctacatttgctgcttatgaacccctaaaggctttaaatcctgtggaagtggcattggtgacatggcagtctgtgaaggaaatggtatttgaagggggtcctcgtccatggatcttggagccctcccgattttttttggaattgaatgcggagaagacagagaagattggaatagcacaagtgtggctgccatctaagagaaaacagaaccagtacatctaccggatccaatgcctggatttaggggaacaagttctcacattccgaattggaaatcatccaggtgtcctgaaccctagtccagctgtagaggttttgcaggttcgcttcatttgtgcccaccctgccagtatgtcagtaactccagtatacaaggtgccagctggtgcccagccatgtcctctgccacagcacaacaaatggctgattcctgtatcaagactgagggacacagtcctggaactagcagtgtttgatcaacataggagaaagtttgataatttcagttcactaatgctagaatggaaatcctccaatgaaacactagcccatttcgaagattataaatcagtggaaatggtagcaaaagatgatggcagtgggcagacccggttacatggtcatcagatccttaaagtacatcagataaaagggactgtactgattggagtcaattttgtgggctattcagagaagaaaagcccaaaagaaatttccaacttgcccagatctgtagatgtggaactgctcctggtagatgatgtaactgtagtgcctgagaatgccaccatctataaccaccctgatgtaaaggaaacatttagccttgtggaaggatctggttattttttagtcaacagcagtgagcagggtgttgtcaccatcacttacatggaagcagaaagctctgttgagttagttccattacatcctggattttttaccttggaggtctatgatctttgtttggctttcttgggtccagcaacagcccacctcagggtgtcagacatacaagagctggagcttgatctgattgataaggttgaaatagacaaaactgtgttagtgactgtgagggttcttggctcttccaaacgcccattccaaaataaatacttcagaaacatggaactcaaactgcagttggcttctgccattgtcaccctgacaccaatggagcaacaggacgaatactctgaaaattatattcttcgagctaccactattgggcaaaccacacttgtggctattgccaaggacaagatgggaagaaaatacacatcaactcctcggcacattgaagtgtttcctccattcagacttcttccagagaaaatgacactgattccaatgaatatgatgcaggtaatgtctgaaggtggcccccagccccaatccatcgttcacttctccatcagtaatcagaccgtggctgttgttaataggagggggcaagttacagggaagattgttggcacagctgtggttcatggcaccatccagacagtaaatgaagatactggcaaagtcattgtgttttctcaggatgaagtacagattgaagttgttcagctaagggctgttaggatccttgcagctgcaactcggctcatcacagctaccaagatgccagtttatgtcatgggagtaaccagtacccagacccctttctccttcagcaatgctaatcctgggctcacattccactggtctatgagcaaaagggatgtattggatctagtgcccaggcattcagaggtttttctacagctcccagtagagcataactttgccatggttgtccatacaaaagcagcaggcaggaccagtatcaaggtcactgttcactgcatgaacagttcctctgggcagtttgaggggaatttgttggaactctctgatgaagtacagatcctggtgtttgaaaaactccaactcttctatccagagtgccaaccagagcagattctgatgcctataaattctcagctcaaactccataccaacagggaaggagctgccttcgtgagttctcgtgttctcaagtgtttccctaattcatccgtcattgaggaggatggtgaagggctcctgaaagctggttccattgcaggtactgctgtattggaagtcacttctatagaaccttttggagtcaaccaaacaaccataactggggtccaggtagcaccggtgacatacctgcgagtgagcagccaacccaagctatacacagcccaaggaaggaccctgtcagcatttcccttgggcatgtctcttaccttcactgttcagttttataatagtatcggagagaaattccacacacacaatacccagctttatctggctctgaacagagatgacttgctgcatattggaccagggaataagaactatacttacatggcccaggctgtgaacagagggctgacacttgtggggctttgggaccggagacatccaggcatggcagattatattcctgttgctgtagagcatgccattgagccagacaccaagcttacctttgttggagatatcatctgcttcagtactcaccttgtcagccagcatggtgaacctgggatatggatgatttctgccaacaatattctacagacagacattgtcactggagtaggagtggccaggagtccggggactgcaatgatttttcatgacatcccaggagtagtgaaaacatatcgagaggtggtggtcaatgcatcatcaagattaatgctcagttatgacctcaagacttatctcaccaataccctcaattcaactgtattcaagctcttcatcaccactggcagaaatggtgtcaatcttaaaggattctgtaccccaaaccaggccttggccattacaaaagtacttcttccagcgaccctcatgctgtgccatgtacagttcagtaatactttgctagacattccagcaagtaaagtctttcaggtccattcagatttcagtatggagaaaggggtttatgtctgcataatcaaggttcgaccgcagtcagaggagctgctacaggccctcagtgtggctgacacctcagtctatgggtgggctacactggtcagtgaacgtagcaagaatggaatgcaacgaatcctcattcctttcatcccagccttttatattaaccagtcagaattggttcttagccacaaacaagatatcggggagataagagtactgggagtggacagagttcttaggaagctagaggtcatctccagctccccagttctagtggtcgctggccatagccactctcccctcactcctggcctggccatttactctgtaagagtggtcaacttcacttccttccagcaaatggcatcacctgttttcatcaatatttcctgtgtactcaccagtcaaagtgaggcagtggtagtgagggctatgaaagataagttgggtgcagatcactgtgaagattccgccatcctcaagcggttcactggctcttaccagatcctgctcttgaccctctttgcagtgctggcatcaacagcttccatcttcctagcatacaatgccttcctaaacaagatacaaacagttccagttgtgtatgtaccaactctaggaacaccacagccaggtttttttaactccacaagttctccccctcacttcatgagtctacaacctccattggcccaaagtcggctgcaacattggttatggagtataaggcactaa

SEQ ID NO: 138 - DNA, 987 bp, Homo sapiens
atgagaccaagcagcaatgttacagaatttgtcctcctgggcctcactcaagatcctgatgtgaaaaaaacattatttgtcatgtttttactcatatacattgtgacaatggtgggaaacctcctcatttgggtgactactattggcagcccctccttgggctccctaatgtacttcttccttgcctacttgtcacttatggatgccatatattccactgccatgtcacccaaattgatgatagacttactctgtgataaaatcgctatttccttgtcagcttgcatgggtcagctcttcatagaacacttacttggtggtgcagaggtcttccttttggtggtgatggcctatgatcgctatgtggctatctctaagccgctgcactatttgaacatcatgaatcgactggtttgcatccttctgttggtggtggccatgattggaggttttgtgcactctgtggttcaaattgtctttctgtacagtctaccaatctgtggccccaatgttattgaccactctgtctgtgacatgtacccattgttggaactgttgtgccttgacacctactttataggactcactgtggttgccaatggtggaataatttgtatggtcatctttacctttctgctaatctcctgtggagtcatcctaaacttccttaaaacttacagtcaggaagagaggcataaagccctgcctacctgcatctcccacatcattgtggttgccctcgtttttgttccctgtatttttatgtatgttagacccgtttccaactttccctttgataaattaatgactgtgttttattcaattatcacactcatgttgaatcctttaatatactcgttgagacaatcagagatgaaaaatgctatgaaaaatctctggtgtgaaaagttaagtatagttagaaaaagagtatctcccacactgaacatatttattcctagttctaaggcaacaaataggcggtaa

SEQ ID NO: 139 - DNA, 963 bp, Homo sapiens
atgtcatttctaaatggcaccagcctaactccagcttcattcatcctaaatggcatccctggtttggaagatgtgcatttgtggatctccttcccactgtgtaccatgtacagcattgctattacagggaacttcggccttatgtacctcatctactgtgatgaggccttacacagacctatgtatgtcttccttgcccttctttccttcacagatgtgctcatgtgcaccagcacccttcccaacactctcttcatattgtggtttaatctcaaggagattgattttaaagcctgcctcgcccagatgttctttgtgcacaccttcacagggatggagtctggggtgctcatgctcatggccctggaccactgtgtggccatctgcttccctctgcgttatgccaccatcctcactaattcagtcattgctaaagctgggttcctcacttttcttaggggtgtgatgcttgttatcccttccactttcctcaccaagcgccttccatactgcaagggcaacgtcataccccacacctactgtgaccacatgtctgtggccaagatatcttgtggtaatgtcagggttaacgccatctatggtttgatagttgccctgctgattgggggctttgatatcctgtgcattacaatctcctacactatgattcttcaagcagttgtgagtctatcatcagcagatgctcgacagaaggccttcagcacctgcactgcccacttctgtgccatagtcctcacctatgttccagccttctttaccttctttacacaccattttgggggacacaccattcctctacacatacatattattatggctaatctctacctactaatgcctcccacaatgaaccctattgtgtatggggtgaaaaccaggcaggtacgagaaagtgtcattaggttctttcttaagggaaaggacaattctcataacttttaa

SEQ ID NO: 140 - DNA, 2781 bp, Homo sapiens
atggtttctagtgtgcttccaaaccccacctcggctgagtgttgggcagcacttctacatgatcctatgactcttgatatggacgcagtcctgtcagactttgttcggtccacgggggcagaacctggtctggccagagacctgctggaaggcaaaaactgggacctgacagccgctctgagcgactatgagcagctccgccaggtgcacacagccaatctgccacatgtgttcaatgaagggcggggtcccaagcagccagagcgagagccacagcccgggcacaaggtggagcgaccctgcctgcagaggcaggacgacattgcccaagaaaagcggctttcccgggggatttcccacgccagctcagccatcgtctccctggcccggtcccacgtggcaagtgaatgcaacaacgagcagttccccctggagatgccaatctacacattccagttgccagacctgagcgtgtacagcgaggatttcaggagcttcatcgagcgggacttgatcgagcaggcaacaatggtggctttggagcaggcaggtcgcctgaactggtggtccactgtgtgcacgagctgtaaacggcttcttcctctggccacaacaggggatgggaactgccttttacatgctgcttcactgggaatgtgggggtttcacgaccgggacctggtgttacggaaagctctctataccatgatgaggacgggagctgagagggaagccctgaagcggaggtggaggtggcagcagacgcagcagaataaggaggaggagtgggagcgggagtggacggagctgctgaagctggcctccagcgagccgcgcacacacttcagcaagaatggcggcacgggcgggggtgtggacaactctgaggaccccgtgtacgagagcctggaagagttccacgtttttgtcctagcccatatattaagaaggcccatcgttgttgtggcagatacaatgttaagagactcaggtggagaagcgttcgcacccatcccattcggagggatctacctgcccttggaggtccctcccaacagatgccactgctcgcctctggttctggcctatgatcaagcccatttctctgcccttgtgtccatggaacagagagaccagcaaagagaacaagccgtgatccccctgacggattctgagcacaagctgctgcctctgcactttgcagtggaccctggcaaggactgggagtgggggaaagacgacaacgataacgcccggctggcccaccttatcctgtcgctagaagccaagctgaaccttctgcacagctacatgaacgtgacgtggatccggatcccctccgagacacgggcgcccctggcacagccggagtctcccacggcctcggcaggggaggacgtgcagtccctggccgactcgctggactcggaccgcgattcggtgtgcagcaattctaacagcaataacggcaagaacggcaaggacaaggagaaggagaagcagcgcaaggagaaggacaagacgcgcgccgactccgtggccaacaagctgggcagcttcagcaagacgctgggcatcaagctgaagaaaaacatgggcggcctcggcggcctggtgcacggcaagatgggccgcgccaactccgccaatggcaagaacggggactcggccgagcggggcaaggagaagaaggccaagtcgcgcaagggcagcaaggaggagtctggtgcgtcggccagcacgtcgccgtcggaaaagaccacgccgtcgcccacagacaaggcagcgggcgcgtcgccggcggagaagggcggtgggccgcggggcgacgcctggaagtacagcacggatgtgaagctgagcctcaacatcctgcgcgccgccatgcagggggagcgcaagttcatcttcgccggcctgctgctcaccagccaccggcaccagttccacgaggagatgatcggctactacctgacgagcgcgcaggagcgcttcagcgccgagcaggagcagcggcgccgcgacgccgctactgcggccgccgctgccgccgccgccgccgccgccacggccaagcggccgccgcgcagaccggagacggagggcgtgccggtcccggagcgcgcctctccgggcccacccacgcagctggtgctcaagctcaaggagcggccgagccccgggcccgcggcagggcgtgcggcgcgggcggcggcgggcggcacggcctccccggggggaggcgcgcggcgtgcgagcgccagcggaccagtgcctggccgcagccccccggcgccagcgcgccagagcgtcatccacgtgcaggcgtcgggcgcgcgggacgaggcgtgcgcgccggccgtgggggcgctgcggccgtgcgccacgtacccgcagcagaaccgctcgctgtcgtcgcagagctacagcccggcgcgcgccgccgccctgcgcaccgtcaacacggtcgagtcgctggcgcgcgcggtgcccggggccctaccgggcgcggcggggacggcgggggcggccgagcacaagtcgcagacctacaccaacggcttcggcgccctgcgcgacggcctggagttcgccgacgccgacgcgccgaccgcgcgctcgaacggtgagtgcggccgtggcggcccggggccggtgcagcggcgctgccagcgcgagaactgtgcgttctacgggcgcgccgagaccgagcactactgctcctactgctaccgcgaggagctgcggcggcggcgcgaggcgcgcggggcccggccctga

SEQ ID NO: 141 - DNA, 2097 bp, Homo sapiens
atgcggcctcgtccacgctcagcaccggggaagccgaggcggagaagccgcgcgcgcctcagaagctcccggacgcccagcggcggcgcgagcggcggcggcggcagcagcagcagcagcagcacggccaccggcgggagcggcagcagcaccggcagccccggcggcgcggcctcggccccggccccggccccggccggcatgtatcgctccggggagcgcctgctgggcagccacgcgctgcccgcggagcagcgggacttcctgcccctagagacgaccaacaacaacaacaaccaccaccagcccggggcctgggcccgccgggcgggctcctcggcgtcctcgcctccctcggcgtcctcgtccccgcacccttcggccgccgtccccgccgccgatccagccgattcggcctcgggcagcagcaacaagaggaagcgcgacaacaaggccagcacgtatggactcaactacagcctgctgcagcccagcggagggcgggccgcggggggcggccgagcagacggcggcggggtcgtgtacagcgggaccccgtggaaacggaggaactacaaccagggagtcgtgggtctgcatgaagaaatcagtgatttttatgaatacatgtctccaagacctgaggaggagaagatgcggatggaggtggtgaacaggatcgagagtgtaattaaggagctctggcccagcgctgacgtccagatatttggaagttttaaaactggactttatttacctactagtgacatcgacctagtggtgtttgggaagtgggagaacctacccctctggactctggaagaagctcttcggaaacacaaagtcgcagatgaggattcggtgaaagttttagacaaagcaactgtacctattattaaattaacagattcttttactgaagtgaaagttgatatcagctttaatgtacagaatggcgtgagagcagctgacctcatcaaagattttaccaagaaatatcctgtattgccatacttggttttagtattgaaacaattcctattgcagagggaccttaatgaagtatttacaggtggaattggttcttatagtctctttttaatggcagtcagtttccttcagttacatcccagggaagatgcttgcatccccaatacaaactatggtgttctcttaatagaattttttgaattatatggacgacacttcaattatttaaagactggcatccggataaaggatggtggttcatatgtggccaaagatgaagtacagaaaaatatgctagatggctacaggccatcaatgctttatatcgaagatcctttacaaccaggtaacgatgttggaaggagttcatatggggccatgcaagtgaagcaggcctttgattatgcctacgttgttttgagtcatgctgtatcaccaatagcaaagtactatcccaacaatgaaacagaaagcatactaggtagaataattagagtaacagatgaagttgccacatatagagattggatatcaaagcagtggggcttgaagaatagacctgagccttcatgcaatggaaatggtgttaccttgatagtagatactcagcagttagataaatgtaataataatctatctgaagaaaatgaagcccttggaaaatgtagaagtaaaacctcggaatctcttagtaaacactcttcaaactcttcatcaggtccagtgtcgtcctcttctgccacacagtccagctctagtgatgtagattccgatgcaacaccatgcaaaaccccgaaacagctgctttgccgtccgtccactgggaaccgagtagggtcgcaagatgtatccttggagtcctctcaggcagttgggaaaatgcaaagcacccaaaccactaacacatccaacagcaccaacaaatctcagcatggatcagcaaggctctttcgttcttccagcaaaggcttccaaggtacaactcaaacaagccatggttccttgatgacaaacaaacaacatcaaggcaaatccaataatcagtattaccatggcaaaaagaggaaacacaagagggacgcgcccctctcagacctctgtagatag

SEQ ID NO: 142 - DNA, 4749 bp, Homo sapiens
atgggttccaagagaagaagagctacctccccttccagcagtgtcagcggggactttgatgatgggcaccattctgtgtcaacaccaggcccaagcaggaaaaggaggagactttccaatcttccaactgtagatcctattgccgtgtgccatgaactctataataccatccgagactataaggatgaacagggcagacttctctgtgagctcttcattagggcaccaaagcgaagaaatcaaccagactattatgaagtggtttctcagcccattgacttgatgaaaatccaacagaaactaaaaatggaagagtatgatgatgttaatttgctgactgctgacttccagcttctttttaacaatgcaaagtcctattataagccagattctcctgaatataaagccgcttgcaaactctgggatttgtaccttcgaacaagaaatgagtttgttcagaaaggagaagcagatgacgaagatgatgatgaagatgggcaagacaatcagggcacagtgactgaaggatcttctccagcttacttgaaggagatcctggagcagcttcttgaagccatagttgtagctacaaatccatcaggacgtctcattagcgaactttttcagaaactgccttctaaagtgcaatatccagattattatgcaataattaaggagcctatagatctcaagaccattgcccagaggatacagaatggaagctacaaaagtattcatgcaatggccaaagatatagatctcctcgcaaaaaatgccaaaacttataatgagcctggctctcaagtattcaaggatgcaaattcaattaaaaaaatattttatatgaaaaaggctgaaattgaacatcatgaaatggctaagtcaagtcttcgaatgaggactccatccaacttggctgcagccagactgacaggtccttcacacagtaaaggcagccttggtgaagagagaaatcccactagcaagtattaccgtaataaaagagcagtacaaggaggtcgtttatcagcaattacaatggcacttcaatatggctcagaaagtgaagaagatgctgctttagctgctgcacgctatgaagagggagagtcagaagcagaaagcatcacttcctttatggatgtttcaaatcctttttatcagctttatgacacagttaggagttgtcggaataaccaagggcagctaatagctgaacctttttaccatttgccttcaaagaaaaaataccctgattattaccagcaaattaaaatgcccatatcactacaacagatccgaacaaaactgaagaatcaagaatatgaaactttagatcatttggagtgtgatctgaatttaatgtttgaaaatgccaaacgctataatgtgcccaattcagccatctacaagcgagttctaaaattgcagcaagttatgcaggcaaagaagaaagagcttgccaggagagacgatatcgaggacggagacagcatgatctcttcagccacctctgatactggtagtgccaaaagaaaaagtaaaaagaacataagaaagcagcgaatgaaaatcttattcaatgttgttcttgaagctcgagagccaggttcaggcagaagactttgtgacctatttatggttaaaccatccaaaaaggactatcctgattattataaaatcatcttggagccaatggacttgaaaataattgagcataacatccgcaatgacaaatatgctggtgaagagggaatgatagaagacatgaagctgatgttccggaatgccaggcactataatgaggagggctcccaggtttataatgatgcacatatcctggagaagttactcaaggagaaaaggaaagagctgggcccactgcctgatgatgatgacatggcttctcccaaactcaagctgagtaggaagagtggcatttctcctaaaaaatcaaaatacatgactccaatgcagcagaaactaaatgaggtctatgaagctgtaaagaactatactgataagaggggtcgccgcctcagtgccatatttctgaggcttccctctagatctgagttgcctgactactatctgactattaaaaagcccatggacatggaaaaaattcgaagtcacatgatggccaacaagtaccaagatattgactctatggttgaggactttgtcatgatgtttaataatgcctgtacatacaatgagccggagtctttgatctacaaagatgctcttgttctacacaaagtcctgcttgaaacacgcagagacctggagggagatgaggactctcatgtcccaaatgtgactttgctgattcaagagcttatccacaatctttttgtgtcagtcatgagtcatcaggatgatgagggaagatgctacagcgattctttagcagaaattcctgctgtggatcccaactttcctaacaaaccaccccttacatttgacataattaggaagaatgttgaaaataatcgctaccgtcggcttgatttatttcaagagcatatgtttgaagtattggaacgagcaagaaggatgaatcggacagattcagaaatatatgaagatgcagtagaacttcagcagttttttattaaaattcgtgatgaactctgcaaaaatggagagattcttctttcaccggcactcagctataccacaaaacatttgcataatgatgtggagaaagagagaaaggaaaaattgccaaaagaaatagaggaagataaactaaaacgagaagaagaaaaaagagaagctgaaaagagtgaagattcctctggtgctgcaggcctctcaggcttacatcgcacatacagccaggactgtagctttaaaaacagcatgtaccatgttggagattacgtctatgtggaacctgcagaggccaacctacaaccacatatcgtctgtattgaaagactgtgggaggattcagctgaaaaagaagtttttaagagtgactattacaacaaagttccagttagtaaaattctaggcaagtgtgtggtcatgtttgtcaaggaatactttaagttatgcccagaaaacttccgagatgaggatgtttttgtctgtgaatcacggtattctgccaaaaccaaatcttttaagaaaattaaactgtggaccatgcccatcagctcagtcaggtttgtccctcgggatgtgcctctgcctgtggttcgcgtggcctctgtatttgcaaatgcagataaaggtgatgatgagaagaatacagacaactcagaggacagtcgagctgaagacaattttaacttggaaaaggaaaaagaagatgtccctgtggaaatgtccaatggtgaaccaggttgccactactttgagcagctccattacaatgacatgtggctgaaggttggcgactgtgtcttcatcaagtcccatggcctggtgcgtcctcgtgtgggcagaattgaaaaagtatgggttcgagatggagctgcatatttttatggccccatcttcattcacccagaagaaacagagcatgagcccacaaaaatgttctacaaaaaagaagtatttctgagtaatctggaagaaacctgccccatgacatgtattctcggaaagtgtgctgtgttgtcattcaaggacttcctctcctgcaggccaactgaaataccagaaaatgacattctgctttgtgagagccgctacaatgagagcgacaagcagatgaagaaattcaaaggattgaagaggttttcactctctgctaaagtggtagatgatgaaatttactacttcagaaaaccaattgttcctcagaaggagccatcacctttgctggaaaagaagatccagttgctagaagctaaatttgccgagttagaaggtggagatgatgatattgaagagatgggagaagaagatagtgagtctaccccaaagtctgccaaaggcagtgcaaagaaggaaggctccaaacggaaaatcaacatgagtggctacatcctgttcagcagtgagatgagggctgtgattaaggcccaacacccagactactctttcggggagctcagccgcctggtggggacagaatggagaaatcttgagacagccaagaaagcagaatatgaaggcatgatgggtggctatccgccaggccttccacctttgcagggcccagttgatggccttgttagcatgggcagcatgcagccacttcaccctggggggcctccaccccaccatcttccgccaggtgtgcctggcctcccgggcatcccaccaccgggtgtgatgaaccaaggagtggcccctatggtagggactccagcaccaggtggaagtccatatggacaacaggtgggagttttggggcctccagggcagcaggcaccacctccatatcccggcccacatccagctggaccccctgtcatacagcagccaacaacacccatgtttgtagctcccccaccaaagacccagcggcttcttcactcagaggcctacctgaaatacattgaaggactcagtgcggagtccaacagcattagcaagtgggatcagacactggcagctcgaagacgcgacgtccatttgtcgaaagaacaggagagccgcctaccctctcactggctgaaaagcaaaggggcccacaccaccatggcagatgccctctggcgccttcgagatttgatgctccgggacaccctcaacattcgccaagcatacaacctagaaaatgtttaa

SEQ ID NO: 143 - DNA, 1071 bp, Homo sapiens
atggatgccggtgtgactgaaagtggactaaatgtgactctcaccattcggcttcttatgcacggaaaggaagtaggaagcatcattgggaagaaaggggagtcggttaagaggatccgcgaggagagtggcgcgcggatcaacatctcggaggggaattgtccggagagaatcatcactctgaccggccccaccaatgccatctttaaggctttcgctatgatcatcgacaagctggaggaagatatcaacagctccatgaccaacagtaccgcggccagcaggcccccggtcaccctgaggctggtggtgccggccacccagtgcggctccctgattgggaaaggcgggtgtaagatcaaagagatccgcgagagtacgggggcgcaggtccaggtggcgggggatatgctgcccaactccaccgagcgggccatcaccatcgctggcgtgccgcagtctgtcaccgagtgtgtcaagcagatttgcctggtcatgctggagacgctctcccagtctccgcaagggagagtcatgaccattccgtaccagcccatgccggccagctccccagtcatctgcgcgggcggccaagatcggtgcagcgacgctgcgggctacccccatgccacccatgacctggagggaccacctctagatgcctactcgattcaaggacaacacaccatttctccgctcgatctggccaagctgaaccaggtggcaagacaacagtctcactttgccatgatgcacggcgggaccggattcgccggaattgactccagctctccagaggtgaaaggctattgggcaagtttggatgcatctactcaaaccacccatgaactcaccattccaaataacttaattggctgcataatcgggcgccaaggcgccaacattaatgagatccgccagatgtccggggcccagatcaaaattgccaacccagtggaaggctcctctggtaggcaggttactatcactggctctgctgccagtattagtctggcccagtatctaatcaatgccaggctttcctctgagaagggcatggggtgcagctag

SEQ ID NO: 144 - DNA, 1200 bp, Homo sapiens
atgaactttcggcagctgctgttgcacttgccacgttatcttggagcctcgggttccccgcgtcgcctgtggtggtccccgtccctcgacaccatctcctcggtgggctcttggcgtggtcggtcctccaagtccccggcccactggaatcaggtagtgtcagaggcggagaagatcgtggggtaccccacgtccttcatgagccttcgctgcctgctgagcgacgagctcagcaacatcgctatgcaggtgcggaagctggtgggcactcagcaccctctgcttaccacagccagggggcttgtacatgacagctggaatagcctccagttgaggggcttggtggtgctccttatctctaaagcagctgggcccagcagcgtgaacacttcatgtcagaactatgacatggtcagtgggatctactcatgtcaaagaagtttggcagagatcacggagctaattcatattgctctccttgtacatcgtgggatagtaaatttaaatgagttgcaatcatctgatggtccactgaaagacatgcaatttggaaataaaattgctatcctgagtggagactttcttctagcaaatgcctgcaatggactagctctgctacagaacaccaaggttgtggaacttttagcaagtgctcttatggacttggtacaaggagtatatcatgaaaattctacttcaaaggaaagttatatcacagatgatattggaatatcgacttggaaggagcagacttttctctcccatggtgccttactagcaaagagctgccaagctgcaatggaattagcaaagcatgatgctgaggttcagaatatggcatttcagtatgggaagcacatggccatgagtcataagataaattctgatgtccagccttttattaaagaaaagaccagtgactccatgacttttaatctaaactcagctcctgtagtcttacatcaggaatttcttggaagagatttgtggattaaacagatcggagaggctcaagaaaaaggaagattggactatgctaagttgcgagaaagaatcaaagctggcaaaggtgtgacttcagctattgacctgtgtcgttaccatggaaacaaggcactggaggccctggagagctttcctccctcggaggccagatctgctttagaaaacattgtgtttgctgtgaccagattttcatga

SEQ ID NO: 145 - DNA, 1098 bp, Homo sapiens
atgtcaagctcagttgaacagaaaaaagggcctacaagacagcgcaaatgtggcttttgtaagtcaaatagagacaaggaatgtggacagttactaatatctgaaaaccagaaggtggcagcgcaccataagtgcatgctcttttcatctgctttggtatcatcacactctgataatgaaagtcttggtggattttctattgaagatgtccaaaaggaaattaaaagaggcacgaagctgatgtgttctttgtgccattgtcctggagcaacaattggttgtgatgtgaaaacatgtcacaggacataccactaccactgtgcattgcatgataaagctcaaatacgagagaaaccttcacaaggaatttacatggtctattgccgaaaacacaagaaaactgcacataactccgaagctgatttagaagaaagttttaatgaacatgaactggagccctcatcacctaaaagtaaaaagaaaagtcgcaaaggaaggccaagaaaaactaattttaaagggctgtcagaagataccaggtccacatcctcccatggaacagatgaaatggaaagtagttcctatagagataggtctccacacagaagcagccctagtgacaccaggcctaaatgtggattttgccatgtaggggaggaagaaaatgaagcacgaggaaaactgcatatatttaatgccaagaaggcagctgcccattataagtgcatgttgttttcttctggcacagtccagctcacaacaacatcaagagcagaatttggagactttgatattaaaactgtacttcaggagattaaacgaggaaaaagaatgaaatgtacactttgcagtcagcctggtgctactattggatgtgaaataaaagcctgtgttaagacttaccattaccactgtggagtacaagacaaagctaaatacattgaaaatatgtcacgaggaatttacaaactatactgtaaaaatcatagtggaaatgatgagagagatgaagaagatgaggaacgagagagtaaaagccgaggaaaagtagaaattgatcagcaacaactaactcagcagcaacttaatggaaactag

SEQ ID NO: 146 - DNA, 3207 bp, Homo sapiens
atgcctccacgaccatcatcaggtgaactgtggggcatccacttgatgcccccaagaatcctagtagaatgtttactaccaaatggaatgatagtgactttagaatgcctccgtgaggctacattaataaccataaagcatgaactatttaaagaagcaagaaaataccccctccatcaacttcttcaagatgaatcttcttacattttcgtaagtgttactcaagaagcagaaagggaagaattttttgatgaaacaagacgactttgtgaccttcggctttttcaaccctttttaaaagtaattgaaccagtaggcaaccgtgaagaaaagatcctcaatcgagaaattggttttgctatcggcatgccagtgtgtgaatttgatatggttaaagatccagaagtacaggacttccgaagaaatattctgaacgtttgtaaagaagctgtggatcttagggacctcaattcacctcatagtagagcaatgtatgtctatcctccaaatgtagaatcttcaccagaattgccaaagcacatatataataaattagataaagggcaaataatagtggtgatctgggtaatagtttctccaaataatgacaagcagaagtatactctgaaaatcaaccatgactgtgtaccagaacaagtaattgctgaagcaatcaggaaaaaaactcgaagtatgttgctatcctctgaacaactaaaactctgtgttttagaatatcagggcaagtatattttaaaagtgtgtggatgtgatgaatacttcctagaaaaatatcctctgagtcagtataagtatataagaagctgtataatgcttgggaggatgcccaatttgatgttgatggctaaagaaagcctttattctcaactgccaatggactgttttacaatgccatcttattccagacgcatttccacagctacaccatatatgaatggagaaacatctacaaaatccctttgggttataaatagtgcactcagaataaaaattctttgtgcaacctacgtgaatgtaaatattcgagacattgataagatctatgttcgaacaggtatctaccatggaggagaacccttatgtgacaatgtgaacactcaaagagtaccttgttccaatcccaggtggaatgaatggctgaattatgatatatacattcctgatcttcctcgtgctgctcgactttgcctttccatttgctctgttaaaggccgaaagggtgctaaagaggaacactgtccattggcatggggaaatataaacttgtttgattacacagacactctagtatctggaaaaatggctttgaatctttggccagtacctcatggattagaagatttgctgaaccctattggtgttactggatcaaatccaaataaagaaactccatgcttagagttggagtttgactggttcagcagtgtggtaaagttcccagatatgtcagtgattgaagagcatgccaattggtctgtatcccgagaagcaggatttagctattcccacgcaggactgagtaacagactagctagagacaatgaattaagggaaaatgacaaagaacagctcaaagcaatttctacacgagatcctctctctgaaatcactgagcaggagaaagattttctatggagtcacagacactattgtgtaactatccccgaaattctacccaaattgcttctgtctgttaaatggaattctagagatgaagtagcccagatgtattgcttggtaaaagattggcctccaatcaaacctgaacaggctatggaacttctggactgtaattacccagatcctatggttcgaggttttgctgttcggtgcttggaaaaatatttaacagatgacaaactttctcagtatttaattcagctagtacaggtcctaaaatatgaacaatatttggataacttgcttgtgagatttttactgaagaaagcattgactaatcaaaggattgggcactttttcttttggcatttaaaatctgagatgcacaataaaacagttagccagaggtttggcctgcttttggagtcctattgtcgtgcatgtgggatgtatttgaagcacctgaataggcaagtcgaggcaatggaaaagctcattaacttaactgacattctcaaacaggagaagaaggatgaaacacaaaaggtacagatgaagtttttagttgagcaaatgaggcgaccagatttcatggatgctctacagggctttctgtctcctctaaaccctgctcatcaactaggaaacctcaggcttgaagagtgtcgaattatgtcctctgcaaaaaggccactgtggttgaattgggagaacccagacatcatgtcagagttactgtttcagaacaatgagatcatctttaaaaatggggatgatttacggcaagatatgctaacacttcaaattattcgtattatggaaaatatctggcaaaatcaaggtcttgatcttcgaatgttaccttatggttgtctgtcaatcggtgactgtgtgggacttattgaggtggtgcgaaattctcacactattatgcaaattcagtgcaaaggcggcttgaaaggtgcactgcagttcaacagccacacactacatcagtggctcaaagacaagaacaaaggagaaatatatgatgcagccattgacctgtttacacgttcatgtgctggatactgtgtagctaccttcattttgggaattggagatcgtcacaatagtaacatcatggtgaaagacgatggacaactgtttcatatagattttggacactttttggatcacaagaagaaaaaatttggttataaacgagaacgtgtgccatttgttttgacacaggatttcttaatagtgattagtaaaggagcccaagaatgcacaaagacaagagaatttgagaggtttcaggagatgtgttacaaggcttatctagctattcgacagcatgccaatctcttcataaatcttttctcaatgatgcttggctctggaatgccagaactacaatcttttgatgacattgcatacattcgaaagaccctagccttagataaaactgagcaagaggctttggagtatttcatgaaacaaatgaatgatgcacatcatggtggctggacaacaaaaatggattggatcttccacacaattaaacagcatgcattgaactga

SEQ ID NO: 147 - DNA, 2175 bp, Homo sapiens
atgagtgctgaggggtaccagtacagagcgctgtatgattataaaaaggaaagagaagaagatattgacttgcacttgggtgacatattgactgtgaataaagggtccttagtagctcttggattcagtgatggacaggaagccaggcctgaagaaattggctggttaaatggctataatgaaaccacaggggaaaggggggactttccgggaacttacgtagaatatattggaaggaaaaaaatctcgcctcccacaccaaagccccggccacctcggcctcttcctgttgcaccaggttcttcgaaaactgaagcagatgttgaacaacaagctttgactctcccggatcttgcagagcagtttgcccctcctgacattgccccgcctcttcttatcaagctcgtggaagccattgaaaagaaaggtctggaatgttcaactctatacagaacacagagctccagcaacctggcagaattacgacagcttcttgattgtgatacaccctccgtggacttggaaatgatcgatgtgcacgttttggctgacgctttcaaacgctatctcctggacttaccaaatcctgtcattccagcagccgtttacagtgaaatgatttctttagctccagaagtacaaagctccgaagaatatattcagctattgaagaagcttattaggtcgcctagcatacctcatcagtattggcttacgcttcagtatttgttaaaacatttcttcaagctctctcaaacctccagcaaaaatctgttgaatgcaagagtactctctgaaattttcagccctatgcttttcagattctcagcagccagctctgataatactgaaaacctcataaaagttatagaaattttaatctcaactgaatggaatgaacgacagcctgcaccagcactgcctcctaaaccaccaaaacctactactgtagccaacaacggtatgaataacaatatgtccttacaagatgctgaatggtactggggagatatctcgagggaagaagtgaatgaaaaacttcgagatacagcagacgggacctttttggtacgagatgcgtctactaaaatgcatggtgattatactcttacactaaggaaagggggaaataacaaattaatcaaaatatttcatcgagatgggaaatatggcttctctgacccattaaccttcagttctgtggttgaattaataaaccactaccggaatgaatctctagctcagtataatcccaaattggatgtgaaattactttatccagtatccaaataccaacaggatcaagttgtcaaagaagataatattgaagctgtagggaaaaaattacatgaatataacactcagtttcaagaaaaaagtcgagaatatgatagattatatgaagaatatacccgcacatcccaggaaatccaaatgaaaaggacagctattgaagcatttaatgaaaccataaaaatatttgaagaacagtgccagacccaagagcggtacagcaaagaatacatagaaaagtttaaacgtgaaggcaatgagaaagaaatacaaaggattatgcataattatgataagttgaagtctcgaatcagtgaaattattgacagtagaagaagattggaagaagacttgaagaagcaggcagctgagtatcgagaaattgacaaacgtatgaacagcattaaaccagaccttatccagctgagaaagacgagagaccaatacttgatgtggttgactcaaaaaggtgttcggcaaaagaagttgaacgagtggttgggcaatgaaaacactgaagaccaatattcactggtggaagatgatgaagatttgccccatcatgatgagaagacatggaatgttggaagcagcaaccgaaacaaagctgaaaacctgttgcgagggaagcgagatggcacttttcttgtccgggagagcagtaaacagggctgctatgcctgctctgtagtggtggacggcgaagtaaagcattgtgtcataaacaaaacagcaactggctatggctttgccgagccctataacttgtacagctctctgaaagaactggtgctacattaccaacacacctcccttgtgcagcacaacgactccctcaatgtcacactagcctacccagtatatgcacagcagaggcgatga

SEQ ID NO: 148 - DNA, 6861 bp, Homo sapiens
atgtctctgaggagcggcgggcggcggcgcgcggacccaggcgcggatggcgaggccagcagggatgatggcgccacttcctcagtttcggcactcaagcgcctggaacggagtcagtggacggataagatggatttgcggtttggttttgagcggctgaaggagcctggtgagaagacaggctggctcattaacatgcatcctaccgagattttagatgaagataagcgcttaggcagtgcagtggattactactttattcaagatgacggaagcagatttaaggtggctttgccctataaaccgtatttctacattgcgaccagaaagggttgtgagcgagaagtttcatcttttctctccaagaagtttcagggcaaaattgcaaaagtggagactgtccccaaagaggatctggacttgccaaatcacttggtgggtttgaagcgaaattacatcaggctgtccttccacactgtggaggatcttgtcaaagtgaggaaggagatctcccctgccgtgaagaagaacagggagcaggatcacgccagcgacgcgtacacagctctgctttccagtgttctgcagaggggcggtgtcattactgatgaagaggaaacctctaagaagatagctgaccagttggacaacattgtggacatgcgcgagtacgatgttccctaccacatccgcctctccattgacctgaagatccacgtggctcattggtacaatgtcagataccgaggaaatgcttttccggtagaaatcacccgccgagatgaccttgttgaacgacctgaccctgtggttttggcatttgacattgagacgaccaaactgcccctcaagtttcctgatgctgagacagaccagattatgatgatttcctacatgatcgatggccagggctacctcatcaccaacagggagattgtttcagaagatattgaagattttgagttcacccccaagccagaatatgaaggccccttttgtgtcttcaatgaacccgatgaggctcatctgatccaaaggtggtttgaacacgtccaggagaccaaacccaccatcatggtcacctacaacggggacttttttgactggccatttgtggaggcccgggcagcagtccacggtctgagcatgcagcaggagataggcttccagaaggacagccagggggagtacaaggcgccccagtgcatccacatggactgcctcaggtgggtgaagagggacagttaccttcctgtgggcagtcataatctcaaggcggccgccaaggccaagctaggctatgatcccgtggagctagacccggaggacatgtgccggatggccacggagcagccccagactctggccacgtattctgtgtcagatgctgtcgccacttactacctgtacatgaagtacgtccacccattcatctttgctctgtgcaccattattcccatggagcccgacgaggtgctgcggaagggctctggcactctgtgtgaggccttgctgatggtgcaggccttccacgccaacatcatcttccccaacaagcaagagcaggagttcaataagctgacggacgacggacacgtgctggactctgagacctacgtcgggggccacgtggaggccctcgagtctggggttttccgcagcgatatcccttgccggtttaggatgaatcctgccgcctttgacttcctgctgcagcgggttgagaagaccttgcgccacgcccttgaggaagaggagaaagtgcctgtggagcaagtcaccaactttgaagaggtgtgtgatgagattaagagcaagcttgcctccctgaaggacgttcccagccgcatcgagtgtccactcatctaccacctggacgtgggggccatgtaccccaacatcatcctgaccaaccgcctgcagccctctgccatggtggacgaagccacctgtgctgcctgtgacttcaataagcctggagcaaactgccagcggaagatggcctggcagtggaggggcgagttcatgccagccagtcgcagcgaataccatcggatccagcaccagctggagtcagagaagttcccccccttgttcccagaggggccagctcgggcctttcatgaactgtcccgcgaggaacaggcgaaatacgagaagagaaggctggcggattactgccggaaagcctacaagaagatccacatcaccaaggtggaagagcgtctcaccaccatctgccagcgggaaaactccttctacgtggacaccgtgcgtgccttccgggacaggcgttacgagttcaaagggctccacaaggtgtggaaaaagaagctctcggcggccgtggaggtgggcgacgcggctgaggtgaagcgctgcaagaacatggaggtgctgtatgactcgctgcagctggcccacaagtgcatcctgaactccttctatggctatgtcatgcgcaagggggctcgctggtactccatggagatggctggcatcgtctgcttcacaggggccaacatcatcacccaggcacgggagctgatcgagcagattgggaggcccttagagctggacacagatggtatatggtgcgtcctgcccaacagcttcccagaaaattttgtcttcaagacgaccaatgtgaagaagcccaaagtgaccatctcctacccaggcgccatgttgaacatcatggtcaaggaaggcttcaccaatgaccagtaccaggagctggctgagccgtcctcactcacctacgtcacccgctcagagaacagcatcttttttgaggttgatgggccctaccttgccatgattcttccagcctccaaggaagaaggcaagaaattgaagaagaggtatgctgtgttcaatgaagacggttctctggctgagctcaagggctttgaggtcaaacgccgcggggaactgcagctgattaagatcttccaatcctcggtgtttgaggccttcctcaagggcagcacgctggaagaggtgtatggctctgtagccaaggtggctgactactggctggacgtgctgtacagcaaggcagccaacatgcctgactctgagctattcgagctcatctctgagaaccgttccatgtctcggaagctggaagattacggggagcagaagtctacgtccatcagcacagcaaagcgcctggccgagttcctgggagaccagatggtcaaggatgcagggctgagttgccgctacatcatctcccgcaagcccgagggctcccctgtcacggagagggccatcccacttgccattttccaagcagagcccacggtgaggaagcactttctccggaaatggctcaagagctcttcccttcaagactttgatattcgagcaattctggattgggactactacattgagcggctgggaagcgccatccagaagatcatcaccatccctgcggccctgcagcaggtaaagaacccagtgccacgtgtcaaacaccccgactggctgcacaaaaaactgctggagaagaatgatgtctacaagcagaagaagatcagtgagctcttcaccctggagggcaggagacaggtcacgatggccgaggcctcagaagacagtccgaggccaagtgctcctgacatggaggacttcggcctcgtaaagctgcctcacccagcagcccctgtcactgtgaagaggaagcgagttctttgggagagccaggaggagtcccaggacctcacgccgactgtgccctggcaggaaatcttggggcagcctcccgccctgggaaccagccaggaggaatggcttgtctggctccggttccacaagaagaagtggcagctgcaggcccggcagcgcctcgcccgcaggaagaggcagcgtctggagtcggcagagggtgtgctcaggcccggggccatccgggatggtcctgccacggggctggggagcttcttgcgaagaactgcccgcagcatcctggaccttccgtggcagattgtgcagatcagcgagaccagccaggccggcctgttcaggctgtgggcgctcgttggcagtgacttgcactgcatcaggctgagcatcccccgtgtgttctacgtgaaccagcgagtcgctaaagcggaggagggtgcttcgtatcgcaaggtaaatcgggtccttcctcgctccaacatggtctacaatctctatgagtattcagtgccagaggacatgtaccaggaacacatcaacgagatcaacgctgagctgtcagcgccagacatcgagggcgtatatgagactcaggttccgttactgttccgggccctggtgcacctgggctgtgtgtgtgtggtcaataaacagctggtgaggcacctttcaggctgggaagcagagacctttgctcttgagcacctggagatgcgctctctggcccagttcagctacctggaaccagggagtatccgccatatctacctgtaccaccacgcacaggcccacaaagcgctcttcgggatcttcatcccctcacagcgcagggcatccgtctttgtgctggacactgtgcgcagcaaccagatgcccagccttggcgccctgtactcagcagagcacggcctcctcctggagaaggtgggccctgagctcctgccaccccccaaacacaccttcgaagttcgggcagaaactgacctgaagaccatctgcagagccatccagcgattcctgctcgcctacaaggaggagcgccgggggcccacactcatcgctgttcagtccagctgggagctgaagaggctggccagtgaaattcctgtcttggaggaattcccactggtgcctatctgtgtggctgacaagatcaactatggggtcctggactggcagcgccatggagcccggcgcatgatccgtcactacctcaacctggacacctgcctgtcgcaggccttcgagatgagcaggtactttcacattcccattgggaacctaccagaggacatctccacattcggctccgacctcttctttgcccgccacctccagcgccacaaccacctgctctggctgtcccctacagcccgccctgacctgggtggaaaggaggctgatgacaactgtcttgtcatggagttcgatgaccaagccactgttgagatcaacagttcaggctgttactccacagtgtgtgtggagctggaccttcagaacctggccgtcaacaccattctccagtctcaccatgtcaacgacatggagggggccgacagcatggggatcagcttcgacgtgatccagcaggcctccctggaggacatgatcacgggtggtcaggctgccagtgccccggccagctacgatgagacagccctgtgctctaacaccttcaggatcctgaagagcatggtcgtgggctgggtgaaggagatcacccagtaccacaacatctatgcagacaaccaggtgatgcacttctaccgctggcttcggtcgccatcctctctgcttcatgaccctgccctgcaccgcacactccacaacatgatgaagaagctcttcctgcagctcatcgctgagttcaagcgcctggggtcatcagtcatctacgccaacttcaaccgcatcatcctctgtacaaagaagcgccgtgtggaagatgccatcgcttacgtggagtacatcaccagcagcatccattcaaaggagaccttccattctctgacaatttctttctctcgatgctgggaatttcttctctggatggatccatctaactatggcggaatcaaaggaaaagtttcatctcgtattcactgtggactgcaagactcccagaaagcagggggagcagaggatgagcaggaaaatgaggacgatgaggaggaaagagatggggaggaggaggaagaggcggaggaatccaacgtggaggatttactggaaaacaactggaacattttgcagtttttgccacaggcagcctcctgccagaactacttcctcatgattgtttcagcgtacatcgtggccgtgtaccactgcatgaaggacgggctgaggcgcagtgctccagggagcacccccgtgaggaggaggggggccagccagctctcccaggaggccgagggggcggtcggagcccttcccggaatgatcaccttctctcaggattatgtcgcaaatgagctcactcagagcttcttcaccatcactcagaagattcagaagaaagtcacaggctctcggaactccactgagctctcagagatgtttcctgtcctccccggttcccacttgctgctcaataaccctgccctggagttcatcaaatacgtgtgcaaggtgctgtccctggacaccaacatcacaaaccaggtgaataagctgaaccgagacctgcttcgcctggtggatgtcggcgagttctccgaggaggcccagttccgagacccctgccgctcctacgtgcttcctgaggtcatctgccgcagctgtaacttctgccgcgacctggacctgtgtaaagactcttccttctcagaggatggggcggtcctgcctcagtggctctgctccaactgtcaggcgccctacgactcctctgccatcgagatgacgctggtggaagttctacagaagaagctgatggccttcaccctgcaggacctggtctgcctgaagtgccgcggggtgaaggagaccagcatgcctgtgtactgcagctgcgcgggagacttcgccctcaccatccacacccaggtcttcatggaacagatcggaatattccggaacattgcccagcactacggcatgtcgtacctcctggagaccctggagtggctgctgcagaagaacccacagctgggccattag

SEQ ID NO: 149 - DNA, 771 bp, Homo sapiens
atgctctggcaaaaacccacagctccggagcaagccccagccccggcccggccataccagggcgtccgtgtgaaggagccagtgaaggaactgctgaggaggaagcgaggccacgccagcagtggggcagcacctgcacctacggcggtggtgctgccccatcagcccctggcgacctacaccacagtgggtccttcctgcctggacatggaaggttctgtgtctgcagtgacagaggaggctgccctgtgtgccggctggctctcccagcccaccccggccaccctgcagcccctggccccatggacaccttacaccgagtatgtgccccatgaagctgtcagctgcccctactcagctgacatgtatgtgcagcccgtgtgccccagctacacggtggtggggccctcctcagtgttgacctatgcctctccgccactcatcaccaatgtcacgacaagaagctccgccacgcccgcagtggggcccccgctggagggcccagagcaccaggcacccctcacctatttcccgtggcctcagcccctttccacactacccacctccaccctgcagtaccagcctccggccccagccctacctgggccccagtttgtccagctccccatctctatcccagagccagtccttcaggacatggaagaccccagaagagccgccagctcgttgaccatcgacaagctgcttttggaggaagaggatagcgacgcctatgcgcttaaccacactctctctgtggaaggcttttag

SEQ ID NO: 150 - DNA, 1392 bp, Homo sapiens
atggttcactccagcatgggggctccagaaataagaatgtctaagcccctggaggccgagaagcaaggtctggactccccatcagagcacacagacaccgaaagaaatggaccagacactaatcatcagaacccccaaaataagacctccccattctccgtgtccccaactggccccagtacaaagatcaaggctgaagaccccagtggcgattcagccccagcagcacccctgccccctcagccggcccagcctcatctgccccaggcccaactcatgttgacgggcagccagctagctggggacatacagcagctcctccagctccagcagctggtgcttgtgccaggccaccacctccagccacctgctcagttcctgctaccgcaggcccagcagagccagccaggcctgctaccgacaccaaatctattccagctacctcagcaaacccagggagctcttctgacctcccagccccgggccgggcttcccacacagccccccaaatgcttggagccaccatcccaccccgaggagcccagtgatctggaggagctggagcaattcgcccgcaccttcaagcaacgccgcatcaagctgggcttcacgcagggtgatgtgggcctggccatgggcaagctctacggcaacgacttcagccagacgaccatttcccgcttcgaggccctcaacctgagcttcaagaacatgtgcaaactcaagcccctcctggagaagtggctcaacgatgcagagactatgtctgtggactcaagcctgcccagccccaaccagctgagcagccccagcctgggtttcgacggcctgcccggccggagacgcaagaagaggaccagcatcgagacaaacgtccgcttcgccttagagaagagttttctagcgaaccagaagcctacctcagaggagatcctgctgatcgccgagcagctgcacatggagaaggaagtgatccgcgtctggttctgcaaccggcgccagaaggagaaacgcatcaacccctgcagtgcggcccccatgctgcccagcccagggaagccggccagctacagcccccatatggtcacaccccaagggggcgcggggaccttaccgttgtcccaagcttccagcagtctgagcacaacagttactaccttatcctcagctgtggggacgctccaccccagccggacagctggagggggtgggggcgggggcggggctgcgccccccctcaattccatcccctctgtcactcccccacccccggccaccaccaacagcacaaaccccagccctcaaggcagccactcggctatcggcttgtcaggcctgaaccccagcacgggccctggcctctggtggaaccctgccccttaccagccttga

SEQ ID NO: 151 - DNA, 1818 bp, Homo sapiens
atggcggggctgtactcgctgggagtgagcgtcttctccgaccagggcgggaggaagtacatggaggacgttactcaaatcgttgtggagcccgaaccgacggctgaagaaaagccctcgccgcggcggtcgctgtctcagccgttgcctccgcggccgtcgccggccgcccttcccggcggcgaagtctcggggaaaggcccagcggtggcagcccgagaggctcgcgaccctctcccggacgccggggcctcgccggcacctagccgctgctgccgccgccgttcctccgtggcctttttcgccgtgtgcgacgggcacggcgggcgggaggcggcacagtttgcccgggagcacttgtggggtttcatcaagaagcagaagggtttcacctcgtccgagccggctaaggtttgcgctgccatccgcaaaggctttctcgcttgtcaccttgccatgtggaagaaactggcggaatggccaaagactatgacgggtcttcctagcacatcagggacaactgccagtgtggtcatcattcggggcatgaagatgtatgtagctcacgtaggtgactcaggggtggttcttggaattcaggatgacccgaaggatgactttgtcagagctgtggaggtgacacaggaccataagccagaacttcccaaggaaagagaacgaatcgaaggacttggtgggagtgtaatgaacaagtctggggtgaatcgtgtagtttggaaacgacctcgactcactcacaatggacctgttagaaggagcacagttattgaccagattccttttctggcagtagcaagagcacttggtgatttgtggagctatgatttcttcagtggtgaatttgtggtgtcacctgaaccagacacaagtgtccacactcttgaccctcagaagcacaagtatattatattggggagtgatggactttggaatatgattccaccacaagatgccatctcaatgtgccaggaccaagaggagaaaaaatacctgatgggtgagcatggacaatcttgtgccaaaatgcttgtgaatcgagcattgggccgctggaggcagcgtatgctccgagcagataacactagtgccatagtaatctgcatctctccagaagtggacaatcagggaaactttaccaatgaagatgagttatacctgaacctgactgacagcccttcctataatagtcaagaaacctgtgtgatgactccttccccatgttctacaccaccagtcaagtcactggaggaggatccatggccaagggtgaattctaaggaccatatacctgccctggttcgtagcaatgccttctcagagaattttttagaggtttcagctgagatagctcgagagaatgtccaaggtgtagtcataccctcaaaagatccagaaccacttgaagaaaattgcgctaaagccctgactttaaggatacatgattctttgaataatagccttccaattggccttgtgcctactaattcaacaaacactgtcatggaccaaaaaaatttgaagatgtcaactcctggccaaatgaaagcccaagaaattgaaagaacccctccaacaaactttaaaaggacattagaagagtccaattctggccccctgatgaagaagcatagacgaaatggcttaagtcgaagtagtggtgctcagcctgcaagtctccccacaacctcacagcgaaagaactctgttaaactcaccatgcgacgcagacttaggggccagaagaaaattggaaatcctttacttcatcaacacaggaaaactgtttgtgtttgctga

SEQ ID NO: 152 - DNA, 1770 bp, Homo sapiens
atggcggcggccgacggcgacgactcgctgtaccccatcgcggtgctcatagacgaactccgcaatgaggacgttcagcttcgcctcaacagcatcaagaagctgtccaccatcgccttggcccttggggttgaaaggacccgaagtgagcttctgcctttccttacagataccatctatgatgaagatgaggtcctcctggccctggcagaacagctgggaaccttcactaccctggtgggaggcccagagtacgtgcactgcctgctgccaccgctggagtcgctggccacagtggaggagacagtggtgcgggacaaggcagtggagtccttacgggccatctcacacgagcactcgccctctgacctggaggcgcactttgtgccgctagtgaagcggctggcgggcggcgactggttcacctcccgcacctcggcctgcggcctcttctccgtctgctacccccgagtgtccagtgctgtgaaggcggaacttcgacagtacttccggaacctgtgctcagatgacacccccatggtgcggcgggccgcagcctccaagctgggggagtttgccaaggtgctggagctggacaacgtcaagagtgagatcatccccatgttctccaacctggcctctgacgagcaggactcggtgcggctgctggcggtggaggcgtgcgtgaacatcgcccagcttctgccccaggaggatctggaggccctggtgatgcccactctgcgccaggccgctgaagacaagtcctggcgcgtccgctacatggtggctgacaagttcacagagctccagaaagcagtggggcctgagatcaccaagacagacctggtccctgccttccagaacctgatgaaagactgtgaggccgaggtgagggccgcagcctcccacaaggtcaaagagttctgtgaaaacctctcagctgactgtcgggagaatgtgatcatgtcccagatcttgccctgcatcaaggagctggtgtccgatgccaaccaacatgtcaagtctgccctggcctcagtcatcatgggtctctctcccatcttgggcaaagacaacaccatcgagcacctcttgcccctcttcctggctcagctgaaggatgagtgccctgaggtacggctgaacatcatctctaacctggactgtgtgaacgaggtgattggcatccggcagctgtcccagtccctgctccctgccattgtggagctggctgaggacgccaagtggcgggtgcggctggccatcattgagtacatgcccctcctggctggacagctgggagtggagttctttgatgagaaacttaactccttgtgcatggcctggcttgtggatcatgtatatgccatccgcgaggcagccaccagcaacctgaagaagctagtggaaaagtttgggaaggagtgggcccatgccacaatcatccccaaggtcttggccatgtccggagaccccaactacctgcaccgcatgactacgctcttctgcatcaatgtgctgtctgaggtctgtgggcaggacatcaccaccaagcacatgctacccacggttctgcgcatggctggggacccggttgccaatgtccgcttcaatgtggccaagtctctgcagaagatagggcccatcctggacaacagcaccttgcagagtgaagtcaagcccatcctagagaagctgacccaggaccaggatgtggacgtcaaatactttgcccaggaggctctgactgttctgtctctcgcctga

SEQ ID NO: 153 - DNA, 1029 bp, Homo sapiens
atggcgccgctagacctggacaagtatgtggaaatagcgcggctgtgcaagtacctgccagagaacgacctgaaggtgagccctatttgcgggctcgccccttccggctgtggggcgcccgccggccggcccttcctttctccaggacccccgccggtatttcattttcttcgttttctaaaggagcggctatgtgactacgtttgtgacctcctcttagaagagtcaaatgttcagccagtatcaacaccagtaacagtgtgtggagatatccatggacagttttatgacctttgtgaactgttcagaactggaggtcaggttcctgacacaaactacatatttatgggtgattttgtagacagaggttactatagtttggagaccttcacttaccttcttgcattaaaggctaaatggcctgatcgtattacacttttgcgaggaaatcatgagagtagacagataacacaggtctatggattttatgatgagtgccaaaccaaatatggaaatgctaatgcctggagatactgtaccaaagtttttgacatgctcacagtagcagctttaatagatgagcagattttgtgtgtccatggtggtttatctcctgatatcaaaacactggatcaaattcgaaccatcgaacggaatcaggaaattcctcataaaggagcattttgtgatctggtttggtcagatcctgaagatgtggatacctgggctatcagtccccgaggagcaggttggctttttggagcaaaggtcacaaatgagtttgttcatatcaacaacttaaaactcatctgcagagcacatcaactagtgcacgaaggctataaatttatgtttgatgagaagctggtgacagtatggtctgctcctaattactgctatcgttgtggaaatattgcttcgatcatggtcttcaaagatgtaaatacaagagaaccaaagttattccgggcagttccagattcagaacgtgttattcctcccagaacgacaacgccatatttcctttga

SEQ ID NO: 154 - DNA, 2478 bp, Homo sapiens
atgttggatatttgcttggaaaaacgtgtgggtacgaccttggctgcccccaagtgtaactccagcactgtgaggtttcagggattggcagaggggaccaaggggaccatgaaaatggacatggaggatgcggatatgactctgtggacagaggctgagtttgaagagaagtgtacatacattgtgaacgaccacccctgggattctggtgctgatggcggtacttcggttcaggcggaggcatccttaccaaggaatctgcttttcaagtatgccaccaacagtgaagaggttattggagtgatgagtaaagaatacataccaaagggcacacgttttggacccctaataggtgaaatctacaccaatgacacagttcctaagaacgccaacaggaaatatttttggaggatctattccagaggggagcttcaccacttcattgacggctttaatgaagagaaaagcaactggatgcgctatgtgaatccagcacactctccccgggagcaaaacctggctgcgtgtcagaacgggatgaacatctacttctacaccattaagcccatccctgccaaccaggaacttcttgtgtggtattgtcgggactttgcagaaaggcttcactacccttatcccggagagctgacaatgatgaatctcacacaaacacagagcagtctaaagcaaccgagcactgagaaaaatgaactctgcccaaagaatgtcccaaagagagagtacagcgtgaaagaaatcctaaaattggactccaacccctccaaaggaaaggacctctaccgttctaacatttcacccctcacatcagaaaaggacctcgatgactttagaagacgtgggagccccgaaatgcccttctaccctcgggtcgtttaccccatccgggcccctctgccagaagactttttgaaagcttccctggcctacgggatcgagagacccacgtacatcactcgctcccccattccatcctccaccactccaagcccctctgcaagaagcagccccgaccaaagcctcaagagctccagccctcacagcagccctgggaatacggtgtcccctgtgggccccggctctcaagagcaccgggactcctacgcttacttgaacgcgtcctacggcacggaaggtttgggctcctaccctggctacgcacccctgccccacctcccgccagctttcatcccctcgtacaacgctcactaccccaagttcctcttgcccccctacggcatgaattgtaatggcctgagcgctgtgagcagcatgaatggcatcaacaactttggcctcttcccgaggctgtgccctgtctacagcaatctcctcggtgggggcagcctgccccaccccatgctcaaccccacttctctcccgagctcgctgccctcagatggagcccggaggttgctccagccggagcatcccagggaggtgcttgtcccggcgccccacagtgccttctcctttaccggggccgccgccagcatgaaggacaaggcctgtagccccacaagcgggtctcccacggcgggaacagccgccacggcagaacatgtggtgcagcccaaagctacctcagcagcgatggcagcccccagcagcgacgaagccatgaatctcattaaaaacaaaagaaacatgaccggctacaagacccttccctacccgctgaagaagcagaacggcaagatcaagtacgaatgcaacgtttgcgccaagactttcggccagctctccaatctgaaggtccacctgagagtgcacagtggagaacggcctttcaaatgtcagacttgcaacaagggctttactcagctcgcccacctgcagaaacactacctggtacacacgggagaaaagccacatgaatgccaggtctgccacaagagatttagcagcaccagcaatctcaagacccacctgcgactccattctggagagaaaccataccaatgcaaggtgtgccctgccaagttcacccagtttgtgcacctgaaactgcacaagcgtctgcacacccgggagcggccccacaagtgctcccagtgccacaagaactacatccatctctgtagcctcaaggttcacctgaaagggaactgcgctgcggccccggcgcctgggctgcccttggaagatctgacccgaatcaatgaagaaatcgagaagtttgacatcagtgacaatgctgaccggctcgaggacgtggaggatgacatcagtgtgatctctgtagtggagaaggaaattctggccgtggtcagaaaagagaaagaagaaactggcctgaaagtgtctttgcaaagaaacatggggaatggactcctctcctcagggtgcagcctttatgagtcatcagatctacccctcatgaagttgcctcccagcaacccactacctctggtacctgtaaaggtcaaacaagaaacagttgaaccaatggatccttaa

SEQ ID NO: 155 - DNA, 1212 bp, Homo sapiens
atgacagccatcatcaaagagatcgttagcagaaacaaaaggagatatcaagaggatggattcgacttagacttgacctatatttatccaaacattattgctatgggatttcctgcagaaagacttgaaggcgtatacaggaacaatattgatgatgtagtaaggtttttggattcaaagcataaaaaccattacaagatatacaatctttgtgctgaaagacattatgacaccgccaaatttaattgcagagttgcacaatatccttttgaagaccataacccaccacagctagaacttatcaaacccttttgtgaagatcttgaccaatggctaagtgaagatgacaatcatgttgcagcaattcactgtaaagctggaaagggacgaactggtgtaatgatatgtgcatatttattacatcggggcaaatttttaaaggcacaagaggccctagatttctatggggaagtaaggaccagagacaaaaagggagtaactattcccagtcagaggcgctatgtgtattattatagctacctgttaaagaatcatctggattatagaccagtggcactgttgtttcacaagatgatgtttgaaactattccaatgttcagtggcggaacttgcaatcctcagtttgtggtctgccagctaaaggtgaagatatattcctccaattcaggacccacacgacgggaagacaagttcatgtactttgagttccctcagccgttacctgtgtgtggtgatatcaaagtagagttcttccacaaacagaacaagatgctaaaaaaggacaaaatgtttcacttttgggtaaatacattcttcataccaggaccagaggaaacctcagaaaaagtagaaaatggaagtctatgtgatcaagaaatcgatagcatttgcagtatagagcgtgcagataatgacaaggaatatctagtacttactttaacaaaaaatgatcttgacaaagcaaataaagacaaagccaaccgatacttttctccaaattttaaggtgaagctgtacttcacaaaaacagtagaggagccgtcaaatccagaggctagcagttcaacttctgtaacaccagatgttagtgacaatgaacctgatcattatagatattctgacaccactgactctgatccagagaatgaaccttttgatgaagatcagcatacacaaattacaaaagtctga

SEQ ID NO: 156 - DNA, 1782 bp, Homo sapiens
atgacatcgcggagatggtttcacccaaatatcactggtgtggaggcagaaaacctactgttgacaagaggagttgatggcagttttttggcaaggcctagtaaaagtaaccctggagacttcacactttccgttagaagaaatggagctgtcacccacatcaagattcagaacactggtgattactatgacctgtatggaggggagaaatttgccactttggctgagttggtccagtattacatggaacatcacgggcaattaaaagagaagaatggagatgtcattgagcttaaatatcctctgaactgtgcagatcctacctctgaaaggtggtttcatggacatctctctgggaaagaagcagagaaattattaactgaaaaaggaaaacatggtagttttcttgtacgagagagccagagccaccctggagattttgttctttctgtgcgcactggtgatgacaaaggggagagcaatgacggcaagtctaaagtgacccatgttatgattcgctgtcaggaactgaaatacgacgttggtggaggagaacggtttgattctttgacagatcttgtggaacattataagaagaatcctatggtggaaacattgggtacagtactacaactcaagcagccccttaacacgactcgtataaatgctgctgaaatagaaagcagagttcgagaactaagcaaattagctgagaccacagataaagtcaaacaaggcttttgggaagaatttgagacactacaacaacaggagtgcaaacttctctacagccgaaaagagggtcaaaggcaagaaaacaaaaacaaaaatagatataaaaacatcctgccctttgatcataccagggttgtcctacacgatggtgatcccaatgagcctgtttcagattacatcaatgcaaatatcatcatgcctgaatttgaaaccaagtgcaacaattcaaagcccaaaaagagttacattgccacacaaggctgcctgcaaaacacggtgaatgacttttggcggatggtgttccaagaaaactcccgagtgattgtcatgacaacgaaagaagtggagagaggaaagagtaaatgtgtcaaatactggcctgatgagtatgctctaaaagaatatggcgtcatgcgtgttaggaacgtcaaagaaagcgccgctcatgactatacgctaagagaacttaaactttcaaaggttggacaagggaatacggagagaacggtctggcaataccactttcggacctggccggaccacggcgtgcccagcgaccctgggggcgtgctggacttcctggaggaggtgcaccataagcaggagagcatcatggatgcagggccggtcgtggtgcactgcagtgctggaattggccggacagggacgttcattgtgattgatattcttattgacatcatcagagagaaaggtgttgactgcgatattgacgttcccaaaaccatccagatggtgcggtctcagaggtcagggatggtccagacagaagcacagtaccgatttatctatatggcggtccagcattatattgaaacactacagcgcaggattgaagaagagcagaaaagcaagaggaaagggcacgaatatacaaatattaagtattctctagcggaccagacgagtggagatcagagccctctcccgccttgtactccaacgccaccctgtgcagaaatgagagaagacagtgctagagtctatgaaaacgtgggcctgatgcaacagcagaaaagtttcagatga

SEQ ID NO: 157 - DNA, 1026 bp, Homo sapiens
atggtcggggaaatggaaacgaaggagaagccgaagcccaccccagattacctgatgcagctgatgaacgacaagaagctcatgagcagcctgcccaacttctgcgggatcttcaaccacctcgagcggctgctggacgaagaaattagcagagtacggaaagacatgtacaatgacacattaaatggcagtacagagaaaaggagtgcagaattgcctgatgctgtgggacctattgttcagttacaagagaaactttatgtgcctgtaaaagaatacccagattttaattttgttgggagaatccttggacctagaggacttacagccaaacaacttgaagcagaaaccggatgtaaaatcatggtccgaggcaaaggctcaatgagggataaaaaaaaggaggagcaaaatagaggcaagcccaattgggagcatctaaatgaagatttacatgtactaatcactgtggaagatgctcagaacagagcagaaatcaaattgaagagagcagttgaagaagtgaagaaattattggtacctgcagcagaaggagaagacagcctgaagaagatgcagctgatggagcttgcgattctgaatggcacctacagagatgccaacattaaatcaccagcccttgccttttctcttgcagcaacagcccaggctgctccaaggatcattactgggcctgcgccggttctcccaccagctgccctgcgtactcctacgccagctggccctaccataatgcctttgatcagacaaatacagaccgctgtcatgccaaacggaactcctcacccaactgctgcaatagttcctccagggcccgaagctggtttaatctatacaccctatgagtacccctacacattggcaccagctacatcaatccttgagtatcctattgaacctagtggtgtattaggtgcggtggctactaaagttcgaaggcacgatatgcgtgtccatccttaccaaaggattgtgaccgcagaccgagccgccaccggcaactaa

SEQ ID NO: 158 - DNA, 834 bp, Homo sapiens
atgagcgccccgggcagccccgaccaggcctatgacttcctgctcaagttcctgctggtgggcgacagggacgtaggcaagagtgagatcctggagagcctgcaggatggtgcagctgagtccccgtacagccatctcggggggatcgactacaagacgaccaccatcctgctggacggccagcgggtgaagctgaagctctgggatacgtcggggcagggaagattttgtaccatattccgctcctactctcgtggtgcacaaggagtgatcctggtctacgacattgcaaaccgctggtctttcgagggtatggatcgatggattaagaagattgaggaacatgcccctggtgtccctaaaatcctggtggggaatcgcctacatctggcattcaagaggcaggtgcccagggagcaggcccaggcctacgccgagcgcctgggtgtgaccttctttgaggtcagccctctgtgcaatttcaacatcatagagtctttcacggagctggccaggatagtgctgctgcggcacaggatgaattggctcgggaggccgagcaaggtactgagcttgcaagacctctgctgccgcaccatcgtgtcctgcacacctgtgcatctggtggacaagctcccgctccccagtaccttaagaagccacctcaagtccttctccatggctaagggcctgaatgccaggatgatgcgaggcctctcctactccctcaccaccagctccactcacaagagcagcctctgcaaagtggagatcgtctgcccaccccagagcccacccaaaaactgcaccagaaacagctgcaaaatttcttaa

SEQ ID NO: 159 - DNA, 579 bp, Homo sapiens
atgcaggccatcaagtgtgtggtggtgggagacggagctgtaggtaaaacttgcctactgatcagttacacaaccaatgcatttcctggagaatatatccctactgtctttgacaattattctgccaatgttatggtagatggaaaaccggtgaatctgggcttatgggatacagctggacaagaagattatgacagattacgccccctatcctatccgcaaacagatgtgttcttaatttgcttttcccttgtgagtcctgcatcatttgaaaatgtccgtgcaaagtggtatcctgaggtgcggcaccactgtcccaacactcccatcatcctagtgggaactaaacttgatcttagggatgataaagacacgatcgagaaactgaaggagaagaagctgactcccatcacctatccgcagggtctagccatggctaaggagattggtgctgtaaaatacctggagtgctcggcgctcacacagcgaggcctcaagacagtgtttgacgaagcgatccgagcagtcctctgcccgcctcccgtgaagaagaggaagagaaaatgcctgctgttgtaa

SEQ ID NO: 160 - DNA, 1896 bp, Homo sapiens
atgttctacgcacattttgttctcagtaaaagagggcctctggccaaaatttggctagcggcccattgggataagaagctaaccaaagcccatgtgttcgagtgtaatttagagagcagcgtggagagtatcatctcaccaaaggtgaaaatggcattacggacatcaggacatctcttactgggagtagttcgaatctatcacaggaaagccaaataccttcttgcagactgtaatgaagcattcattaagataaagatggcttttcggccaggtgtggttgacctgcctgaggaaaatcgggaagcagcttataatgccattactttacctgaagaatttcatgactttgatcagccactgcctgacttagatgacatcgatgtggcccagcagttcagcttgaatcagagtagagtggaagagataaccatgagagaagaagttgggaacatcagtattttacaagaaaatgattttggtgattttggaatggatgatcgtgagataatgagagaaggcagtgcttttgaggatgacgacatgttagtaagcactactacttctaacctcctattagagtctgaacagagcaccagcaatctgaatgagaaaattaaccatttagaatatgaagatcaatataaggatgataattttggagaaggaaatgatggtggaatattagatgacaaacttattagtaataatgatggcggtatctttgatgatccccctgccctctctgaggcaggggtgatgttgccagagcagcctgcacatgacgatatggatgaggatgataatgtatcaatgggtgggcctgatagtcctgattcagtggatcccgttgaaccaatgccaaccatgactgatcaaacaacacttgttccaaatgaggaagaagcatttgcattggagcctattgatataactgttaaagaaacaaaagccaagaggaagaggaagctaattgttgacagtgtcaaagagttggatagcaagacaattagagcccaacttagtgattattcagatattgttactactttggatctggcaccgcccaccaagaaattgatgatgtggaaagagacaggaggagtagaaaaactgttttctttacctgctcagcctttgtggaataacagactactgaagctctttacacgctgtcttacaccgcttgtaccagaagaccttagaaaaaggaggaaaggaggagaggcagataatttggatgaattcctcaaagaatttgaaaatccagaggttcctagagaggaccagcaacagcagcatcagcagcgtgatgttatcgatgagcccattattgaagagccaagccgcctccaggagtcagtgatggaggccagcagaacaaacatagatgagtcagctatgcctccaccaccacctcagggagttaagcgaaaagctggacaaattgacccagagcctgtgatgcctcctcagcaggtagagcagatggaaataccacctgtagagcttcccccagaagaacctccaaatatctgtcagctaataccagagttagaacttctgccagaaaaagagaaggagaaagagaaggaaaaagaagatgatgaagaggaagaggatgaagatgcatcagggggcgatcaagatcaggaagaaagaagatggaacaaaaggactcagcagatgcttcatggtcttcagcgtgctcttgctaaaactggagctgaatctatcagtttgcttgagttatgtcgaaatacgaacagaaaacaagctgccgcaaagttctacagcttcttggttcttaaaaagcagcaagctattgagctgacacaggaagaaccgtacagtgacatcatcgcaacacctggaccaaggttccatattatataa

SEQ ID NO: 161 - DNA, 2613 bp, Homo sapiens
atgaaggggtggtatcacggaaaacttgacagaacgatagcagaagaacgcctcaggcaggcagggaagtctggcagttatcttataagagagagtgatcggaggccagggtcctttgtactttcatttcttagccagatgaatgttgtcaaccattttaggattattgctatgtgtggagattactacattggtggaagacgtttttcttcactgtcagacctaataggttattacagtcatgtttcttgtttgcttaaaggagaaaaattactttacccagttgcaccaccagagccagtagaagatagaaggcgtgtacgagctattctaccttacacaaaagtaccagacactgatgaaataagtttcttaaaaggagatatgttcattgttcataatgaattagaagatggatggatgtgggttacaaatttaagaacagatgaacaaggccttattgttgaagacctagtagaagaggtgggccgggaagaagatccacatgaaggaaaaatatggttccatgggaagatttccaaacaggaagcttataatttactaatgacagttggtcaagtctgcagttttcttgtgaggccctcagataatactcctggcgattattcactttatttccggaccaatgaaaatattcagcgatttaaaatatgtccaacgccaaacaatcagtttatgatgggaggccggtattataacagcattggggacatcatagatcactatcgaaaagaacagattgttgaaggatattatcttaaggaacctgtaccaatgcaggatcaagaacaagtactcaatgacacagtggatggcaaggaaatctataataccatccgtcgtaaaacaaaggatgccttttataaaaacattgttaagaaaggttatcttctgaaaaagggcaaaggaaaacgttggaaaaatttatattttatcttagagggtagtgatgcccaacttatttattttgaaagcgaaaaacgagctaccaaaccaaaaggattaatagatctcagtgtatgttctgtctatgtcgttcatgatagtctctttggcaggccaaactgttttcagatagtagttcagcactttagtgaagaacattacatcttttactttgcaggagaaactccagaacaagcagaggattggatgaaaggtctgcaggcattttgcaatttacggaaaagtagtccagggacatccaataaacgccttcgtcaggtcagcagccttgttttacatattgaagaagcccataaactcccagtaaaacattttactaatccatattgtaacatctacctgaatagtgtccaagtagcaaaaactcatgcaagggaagggcaaaacccagtatggtcagaagagtttgtctttgatgatcttcctcctgacatcaatagatttgaaataactcttagtaataaaacaaagaaaagcaaagatcctgatatcttatttatgcgctgccagttgagccgattacagaaagggcatgccacagatgaatggtttctgctcagctcccatataccattaaaaggtattgaaccagggtccctgcgtgttcgagcacgatactctatggaaaaaatcatgccagaagaagagtacagtgaatttaaagagcttatactgcaaaaggaacttcatgtagtctatgctttatcacatgtatgtggacaagaccgaacactactggccagcatcctactgaggatttttcttcacgaaaagcttgaatcgttgttgttatgcacactaaatgacagagaaataagcatggaagatgaagccactaccctatttcgagccacaacacttgcaagcaccttgatggagcagtatatgaaagccactgctacacagtttgttcatcatgctttgaaagactctattttaaagataatggaaagcaagcagtcttgtgagttaagtccatcaaagttagaaaaaaatgaagatgtgaacactaatttaacacacctattgaacatactttcagagcttgtggagaaaatattcatggcttcagaaatacttccaccgacattgagatatatttatgggtgtttacagaaatctgttcagcataagtggcctacaaataccaccatgagaacaagagttgttagtggttttgtttttcttcgactcatctgtcctgccatcctgaatccacggatgttcaatatcatctcagattctccatctcctattgctgcaagaacactgatattagtggctaaatctgtgcagaacttagcaaatcttgtggaatttggagctaaggagccctacatggaaggtgtcaatccattcatcaaaagcaacaaacatcgtatgatcatgtttttagatgaacttgggaatgtacctgaacttccggacactacagagcattctagaacggacctgtcccgtgatttagcagcattgcatgagatttgcgtggctcattcagatgaacttcgaacgctcagtaatgagcgtggtgcacagcagcacgtattgaaaaagcttctggctataacagaactgcttcaacaaaaacaaaaccagtatacaaaaaccaatgatgtcaggtag

SEQ ID NO: 162 - DNA, 2787 bp, Homo sapiens
atgccgcccaaaaccccccgaaaaacggccgccaccgccgccgctgccgccgcggaacccccggcaccgccgccgccgccccctcctgaggaggacccagagcaggacagcggcccggaggacctgcctctcgtcaggcttgagtttgaagaaacagaagaacctgattttactgcattatgtcagaaattaaagataccagatcatgtcagagagagagcttggttaacttgggagaaagtttcatctgtggatggagtattgggaggttatattcaaaagaaaaaggaactgtggggaatctgtatctttattgcagcagttgacctagatgagatgtcgttcacttttactgagctacagaaaaacatagaaatcagtgtccataaattctttaacttactaaaagaaattgataccagtaccaaagttgataatgctatgtcaagactgttgaagaagtatgatgtattgtttgcactcttcagcaaattggaaaggacatgtgaacttatatatttgacacaacccagcagttcgatatctactgaaataaattctgcattggtgctaaaagtttcttggatcacatttttattagctaaaggggaagtattacaaatggaagatgatctggtgatttcatttcagttaatgctatgtgtccttgactattttattaaactctcacctcccatgttgctcaaagaaccatataaaacagctgttatacccattaatggttcacctcgaacacccaggcgaggtcagaacaggagtgcacggatagcaaaacaactagaaaatgatacaagaattattgaagttctctgtaaagaacatgaatgtaatatagatgaggtgaaaaatgtttatttcaaaaattttataccttttatgaattctcttggacttgtaacatctaatggacttccagaggttgaaaatctttctaaacgatacgaagaaatttatcttaaaaataaagatctagatgcaagattatttttggatcatgataaaactcttcagactgattctatagacagttttgaaacacagagaacaccacgaaaaagtaaccttgatgaagaggtgaatgtaattcctccacacactccagttaggactgttatgaacactatccaacaattaatgatgattttaaattcagcaagtgatcaaccttcagaaaatctgatttcctattttaacaactgcacagtgaatccaaaagaaagtatactgaaaagagtgaaggatataggatacatctttaaagagaaatttgctaaagctgtgggacagggttgtgtcgaaattggatcacagcgatacaaacttggagttcgcttgtattaccgagtaatggaatccatgcttaaatcagaagaagaacgattatccattcaaaattttagcaaacttctgaatgacaacatttttcatatgtctttattggcgtgcgctcttgaggttgtaatggccacatatagcagaagtacatctcagaatcttgattctggaacagatttgtctttcccatggattctgaatgtgcttaatttaaaagcctttgatttttacaaagtgatcgaaagttttatcaaagcagaaggcaacttgacaagagaaatgataaaacatttagaacgatgtgaacatcgaatcatggaatcccttgcatggctctcagattcacctttatttgatcttattaaacaatcaaaggaccgagaaggaccaactgatcaccttgaatctgcttgtcctcttaatcttcctctccagaataatcacactgcagcagatatgtatctttctcctgtaagatctccaaagaaaaaaggttcaactacgcgtgtaaattctactgcaaatgcagagacacaagcaacctcagccttccagacccagaagccattgaaatctacctctctttcactgttttataaaaaagtgtatcggctagcctatctccggctaaatacactttgtgaacgccttctgtctgagcacccagaattagaacatatcatctggacccttttccagcacaccctgcagaatgagtatgaactcatgagagacaggcatttggaccaaattatgatgtgttccatgtatggcatatgcaaagtgaagaatatagaccttaaattcaaaatcattgtaacagcatacaaggatcttcctcatgctgttcaggagacattcaaacgtgttttgatcaaagaagaggagtatgattctattatagtattctataactcggtcttcatgcagagactgaaaacaaatattttgcagtatgcttccaccaggccccctaccttgtcaccaatacctcacattcctcgaagcccttacaagtttcctagttcacccttacggattcctggagggaacatctatatttcacccctgaagagtccatataaaatttcagaaggtctgccaacaccaacaaaaatgactccaagatcaagaatcttagtatcaattggtgaatcattcgggacttctgagaagttccagaaaataaatcagatggtatgtaacagcgaccgtgtgctcaaaagaagtgctgaaggaagcaaccctcctaaaccactgaaaaaactacgctttgatattgaaggatcagatgaagcagatggaagtaaacatctcccaggagagtccaaatttcagcagaaactggcagaaatgacttctactcgaacacgaatgcaaaagcagaaaatgaatgatagcatggatacctcaaacaaggaagagaaatga

SEQ ID NO: 163 - DNA, 2793 bp, Homo sapiens
atggagtatgaaagacgtggtggtcgtggtgacaggactggccgctatggagccactgaccgctcgcaggatgatggtggggagaaccgcagccgagaccacgactaccgggacatggactaccgttcatatcctcgcgagtatggcagccaggagggcaagcatgactatgacgactcatctgaggagcagagtgcggaggattcctacgaggcctccccgggctccgagactcagcgtaggcggcggcggcggcacaggcacagccccaccggcccgccaggcttcccccgagacggcgactatcgggaccaggactatcggaccgagcaaggggaggaggaggaggaggaggaggatgaggaggaggaggagaaggccagtaacatcgtcatgctgaggatgctgccacaggcagccactgaggatgacatccgtggccagctgcagtcgcacggcgtgcaagcacgggaggttcggctgatgcggaacaaatcttcaggtcagagccggggcttcgccttcgtcgagtttagtcacttgcaggacgctacacgatggatggaagccaatcagcactccctcaacatcctgggccagaaggtgtcgatgcactacagtgaccccaagcccaagatcaatgaggactggctgtgcaataagtgtggcgtccagaacttcaaacgccgagagaagtgcttcaaatgtggcgtgcccaagtcagaggcagagcagaagctgcccctcggcacgaggctggatcagcagacactgccactgggtggccgggagctgagccagggcctgcttcccctgccgcagccctaccaggcccagggagtcctggcctcccaagccctgtcacagggctcggagccaagctcagagaacgccaatgacaccatcattttgcgcaacctgaacccacacagcaccatggattccatcctgggggccctggcaccctacgcggtgctgtcctcctccaacgtgcgcgtcataaaggacaagcagacccaactgaaccgcggctttgccttcatccagctctccaccatcgtggaggcagcccagctgctgcagatcctgcaggccctgcacccaccactcactatcgacggcaagaccatcaatgttgagtttgccaagggttctaagagggacatggcctccaatgaaggcagtcgcatcagtgctgcctctgtggccagcactgccattgctgcggcccagtgggccatctcacaggcctcccaaggtggggagggtacctgggccacctccgaggagccgccggtcgactacagctactaccaacaggatgagggctatggcaacagccagggcacagagtcttccctctatgcccatggctacctcaagggcaccaagggccctggcatcactggaaccaaaggggatcccactggagcaggtcccgaggcctccctagagcctggggccgactctgtgtcgatgcaggctttctctcgcgcccagcctggtgctgctcctggcatctaccaacaatcagccgaggcgagcagtagccagggcactgctgccaacagccagtcgtataccatcatgtcacccgctgtgctcaaatctgagctccagagccctacccatcctagttctgctctcccaccggctaccagccccactgcccaggaatcctacagccagtaccctgttcccgacgtctctacctaccagtacgatgagacctccggctactactatgacccccagaccggcctctactatgaccccaactcccagtattactacaatgctcagagccagcagtacctgtactgggatggggagaggcggacctatgttcccgccctggagcagtcggccgacggacataaggagacaggggcaccctcgaaggagggcaaagagaagaaggagaagcacaagaccaagacagctcaacagattgccaaggacatggaacgctgggcccgcagtctcaacaaacaaaaagaaaacttcaaaaatagcttccagcctatcagctccctgcgagatgacgagaggcgggagtcagccactgcagatgctggctatgccatcctcgagaagaagggagcactagccgagagacagcacaccagcatggatctcccgaaattggccagtgacgaccgcccaagccctccgcgaggactggtggcagcctacagcggggagagtgacagtgaggaggagcaggagcgtgggggccctgagcgggaggagaagctcaccgactggcagaagctggcctgtctgctctgccgacgccagttccccagcaaagaggcgctcatccggcaccagcagctctcagggctccacaagcaaaaccttgagattcaccggcgagcccacttgtcagaaaacgagctagaagcactagagaagaatgacatggagcaaatgaagtaccgggaccgtgcagctgaacgcagagaaaagtatggcatccccgagccgccagagcccaagaggaggaagtacggcggcatatccacagcctctgtagacttcgagcagcctactcgggacgggctgggcagtgacaacattggcagtcggatgctgcaggccatgggctggaaagagggcagcggcctgggccgcaagaagcagggcattgtaacgcctatcgaggcccaaacacgggtgcggggctccggcctgggtgcacggggcagctcctacggggtcacctcaaccgagtcctacaaggagacactgcacaagacaatggtgacccgcttcaacgaggcccagtga

SEQ ID NO: 164 - DNA, 555 bp, Homo sapiens
atgccgcagtccaagtcccggaagatcgcgatcctgggctaccggtctgtggggaaatcctcattgacgattcaatttgttgaaggccaatttgtggactcctacgatccaaccatagaaaacacttttacaaagttgatcacagtaaatggacaagaatatcatcttcaacttgtagacacagccgggcaagatgaatattctatctttcctcagacatactccatagatattaatggctatattcttgtgtattctgttacatcaatcaaaagttttgaagtgattaaagttatccatggcaaattgttggatatggtggggaaagtacaaatacctattatgttggttgggaataagaaagacctgcatatggaaagggtgatcagttatgaagaagggaaagctttggcagaatcttggaatgcagcttttttggaatcttctgctaaagaaaatcagactgctgtggatgtttttcgaaggataattttggaggcagaaaaaatggacggggcagcttcacaaggcaagtcttcatgctcggtgatgtga

SEQ ID NO: 165 - DNA, 582 bp, Homo sapiens
atggctgccatccggaagaaactggtgattgttggtgatggagcctgtggaaagacatgcttgctcatagtcttcagcaaggaccagttcccagaggtgtatgtgcccacagtgtttgagaactatgtggcagatatcgaggtggatggaaagcaggtagagttggctttgtgggacacagctgggcaggaagattatgatcgcctgaggcccctctcctacccagataccgatgttatactgatgtgtttttccatcgacagccctgatagtttagaaaacatcccagaaaagtggaccccagaagtcaagcatttctgtcccaacgtgcccatcatcctggttgggaataagaaggatcttcggaatgatgagcacacaaggcgggagctagccaagatgaagcaggagccggtgaaacctgaagaaggcagagatatggcaaacaggattggcgcttttgggtacatggagtgttcagcaaagaccaaagatggagtgagagaggtttttgaaatggctacgagagctgctctgcaagctagacgtgggaagaaaaaatctgggtgccttgtcttgtga

SEQ ID NO: 166 - DNA, 660 bp, Homo sapiens
atggattctggaactcgcccagttggtagctgctgtagcagccccgctgggctctcacgggagtacaaactagtgatgctgggtgctggtggtgtagggaagagtgccatgaccatgcagttcatcagccaccgattcccagaagatcatgatcccaccattgaagatgcttataagatcaggatccgtattgatgatgagcctgccaatctggacattttggatacagctggacaggcagagtttacagccatgcgggaccagtatatgagggcaggagaagggtttatcatctgttactctatcacggatcgtcgaagtttccatgaagttcgtgagtttaaacagcttatttatcgagtccgacgtactgacgatacacctgtggttcttgtgggaaacaagtcagacctcaaacagctaagacaggtcaccaaggaagaaggattggccttggcccgagaattcagctgtcccttttttgagacatctgctgcataccgctactatattgatgatgttttccatgcccttgtacgggagatacgtaggaaagaaaaggaggcagtactggccatggagaaaaaatctaagcccaaaaacagtgtatggaagaggctaaaatcaccattccggaagaagaaagattcagtaacttga

SEQ ID NO: 167 - DNA, 894 bp, Homo sapiens
atggggtttgttaaagttgttaagaataaggcctactttaagagataccaagtgaaatttagaagacgacgagagggtaaaactgattattatgctcggaaacgcttggtgatacaagataaaaataaatacaacacacccaaatacaggatgatagttcgtgtgacaaacagagatatcatttgtcagattgcttatgcccgtatagagggggatatgatagtctgcgcagcgtatgcacacgaactgccaaaatatggtgtgaaggttggcctgacaaattatgctgcagcatattgtactggcctgctgctggcccgcaggcttctcaataggtttggcatggacaagatctatgaaggccaagtggaggtgactggtgatgaatacaatgtggaaagcattgatggtcagccaggtgccttcacctgctatttggatgcaggccttgccagaactaccactggcaataaagtttttggtgccctgaagggagctgtggatggaggcttgtctatccctcacagtaccaaacgattccctggttatgattctgaaagcaaggaatttaatgcagaagtacatcggaagcacatcatgggccagaatgttgcagattacatgcgctacttaatggaagaagatgaagatgcttacaagaaacagttctctcaatacataaagaacagcgtaactccagacatgatggaggagatgtataagaaagctcatgctgctatacgagagaatccagtctatgaaaagaagcccaagaaagaagttaaaaagaagaggtggaaccgtcccaaaatgtcccttgctcagaagaaggatcgggtagctcaaaagaaggcaagcttcctcagagctcaggagcgggctgctgagagctaa

SEQ ID NO: 168 - DNA, 438 bp, Homo sapiens
atggcagaagtagagcagaagaagaagcggaccttccgcaagttcacctaccgcggcgtggacctcgaccagctgctggacatgtcctacgagcagctgatgcagctgtacagtgcgcgccagcggcggcggctgaaccggggcctgcggcggaagcagcactccctgctgaagcgcctgcgcaaggccaagaaggaggcgccgcccatggagaagccggaagtggtgaagacgcacctgcgggacatgatcatcctacccgagatggtgggcagcatggtgggcgtctacaacggcaagaccttcaaccaggtggagatcaagcccgagatgatcggccactacctgggcgagttctccatcacctacaagcccgtaaagcatggccggcccggcatcggggccacccactcctcccgcttcatccctctcaagtaa

SEQ ID NO: 169 - DNA, 882 bp, Homo sapiens
atggcggatgacgccggtgcagcgggggggcccgggggccctggtggccctgggatggggaaccgcggtggcttccgcggaggtttcggcagtggcatccggggccggggtcgcggccgtggacggggccggggccgaggccgcggagctcgcggaggcaaggccgaggataaggagtggatgcccgtcaccaagttgggccgcttggtcaaggacatgaagatcaagtccctggaggagatctatctcttctccctgcctattaaggaatcagagatcattgatttcttcctgggggcctctctcaaggatgaggttttgaagattatgccagtgcagaagcagacccgtgccggccagcgcaccaggttcaaggcatttgttgctatcggggactacaatggccacgtcggtctgggtgttaagtgctccaaggaggtggccaccgccatccgtggggccatcatcctggccaagctctccatcgtccccgtgcgcagaggctactgggggaacaagatcggcaagccccacactgtcccttgcaaggtgacaggccgctgcggctctgtgctggtacgcctcatccctgcacccaggggcactggcatcgtctccgcacctgtgcctaagaagctgctcatgatggctggtatcgatgactgctacacctcagcccggggctgcactgccaccctgggcaacttcgccaaggccacctttgatgccatttctaagacctacagctacctgacccccgacctctggaaggagactgtattcaccaagtctccctatcaggagttcactgaccacctcgtcaagacccacaccagagtctccgtgcagcggactcaggctccagctgtggctacaacatag

SEQ ID NO: 170 - DNA, 2541 bp, Homo sapiens
atggcggaaccgccgagccccgtgcactgtgtcgctgccgcggcccccaccgccaccgtctcggagaaagaaccgtttggcaagctgcaactctcctcccgggaccctccgggttctctgtccgccaagaaggtccggactgaggagaagaaggcaccgcggagagtgaacggagaagggggcagcggcgggaacagcaggcagctgcagccgccggcagcaccttcgcctcagagctatggcagccccgcgtcttggagctttgcccctctgtctgctgctccctccccgtcctcttctcggagcagtttctctttctccgctggcacggccgttccctcctcagcctccgcttccttgtctcagccggtgccgcgcaaactgctggtccctcctacgctgctgcacgctcagcctcaccatctcctcctgcccgccgccgccgccgctgcctcggctaacgccaagtcgcgcagacctaaggagaagcgggagaaggagaggaggaggcacggtctcggtggggcccgagaggccggcggggcctcccgggaggagaacggggaggtgaagccgctgccccgagataaaatcaaagacaaaattaaagagagagacaaagaaaaagaaagagaaaaaaagaaacataaagtaatgaatgagatcaagaaagagaatggagaagtaaagattttgctgaaaagtgggaaggagaaaccaaaaacaaatatagaagacttacaaattaaaaaggtaaagaagaaaaagaaaaagaaacacaaagagaatgaaaaacggaagcgtccgaaaatgtatagcaaatctattcagaccatctgctcaggattgctaactgatgttgaagatcaagcagccaaaggcatcctaaatgataacataaaagattacgttgggaagaatttggataccaagaactatgattccaaaattccagagaacagtgagtttccatttgtctcattaaaggagccacgagttcagaataacctcaaaaggttggacactttggaatttaaacaactcattcatatagagcaccagcctaatggaggtgcatcggttatccatgcctacagtaacgaactctcccacctgtctcctatggagatggagaggtttgcagaagagtttgtgggtctagtgttcagtgaaaatgaaaactctgcagctttctacgtgatgggtattgttcatggggcagctacttatttacctgactttttagactatttttcatttaattttcccaattcaccagtgaaaatggagatattgggaaagaaagatatagagacaacgactatgtccaattttcatgctcaggtaaaaagaacgtattctcatggtacttacagagctggcccaatgagacaaataagcttggtgggagcagttgatgaagaagtaggagattatttccctgagttccttgacatgttggaagagtcaccatttttaaaatgtacactgccatgggggacgctatctagtctaaaattacagagtcgaaaagatagtgatgatggtcccatcatgtgggttcgtccaggagaacaaatgatccctgtggctgatatgccaaagtcacctttcaaaaggaaaagaactaccaatgaaataaaaaatcttcagtacctacctcgaacaagtgagccccgtgagatgctctttgaagacaggacaagagctcatgcagatcatataggacaaggttttgaacgacagactacagctgctgttggagtgctgaaggctgtgcactgtggagagtggcctgatcaaccccgtataaccaaagatgtaatttgttttcatgctgaagatttcttagaagtagttcaacgaatgcagttagatttacatgaacctccactgtcccagtgtgtccaatgggttgatgatgcaaaactgaatcaactgaggagggaaggcattcgctatgccaggattcagctatatgataatgacatttattttattccaaggaatgttgttcatcagttcaagacagtttcagctgtatgcagtttagcatggcatattcggctcaaattatatcactcagaggaggacacttctcagaatacagctactcatgaaacaggcacatcatcagattccacatcatctgttcttggacctcacactgacaacatgatttgtgctgtaagcaaagcctccttggattctgttttttcagataaacttcattctaaatatgaattacagcagattaaacatgaacctattgcatctgtaagaatcaaggaagaacctgtgaatgttaatattcctgaaaagactacagcactgaataatatggatggcaagaatgttaaagcaaaattggatcatgttcaatttgcagaatttaagattgacatggattctaaatttgaaaatagcaacaaagatttaaaggaagaattgtgccctggaaatctaagtctagttgatacaaggcaacacagttcagcacattcaaatcaagataaaaaagacgatgacattttgtgctaa

SEQ ID NO: 171 - DNA, 1362 bp, Homo sapiens
atgcgtatccccgtagatgccagcacgagccgccgcttcacgccgccttccaccgcgctgagcccaggcaagatgagcgaggcgttgccgctgggcgccccggacgccggcgctgccctggccggcaagctgaggagcggcgaccgcagcatggtggaggtgctggccgaccacccgggcgagctggtgcgcaccgacagccccaacttcctctgctccgtgctgcctacgcactggcgctgcaacaagaccctgcccatcgctttcaaggtggtggccctaggggatgttccagatggcactctggtcactgtgatggctggcaatgatgaaaactactcggctgagctgagaaatgctaccgcagccatgaagaaccaggttgcaagatttaatgacctcaggtttgtcggtcgaagtggaagagggaaaagcttcactctgaccatcactgtcttcacaaacccaccgcaagtcgccacctaccacagagccatcaaaatcacagtggatgggccccgagaacctcgaagacatcggcagaaactagatgatcagaccaagcccgggagcttgtccttttccgagcggctcagtgaactggagcagctgcggcgcacagccatgagggtcagcccacaccacccagcccccacgcccaaccctcgtgcctccctgaaccactccactgcctttaaccctcagcctcagagtcagatgcaggatacaaggcagatccaaccatccccaccgtggtcctacgatcagtcctaccaatacctgggatccattgcctctccttctgtgcacccagcaacgcccatttcacctggacgtgccagcggcatgacaaccctctctgcagaactttccagtcgactctcaacggcacccgacctgacagcgttcagcgacccgcgccagttccccgcgctgccctccatctccgacccccgcatgcactatccaggcgccttcacctactccccgacgccggtcacctcgggcatcggcatcggcatgtcggccatgggctcggccacgcgctaccacacctacctgccgccgccctaccccggctcgtcgcaagcgcagggaggcccgttccaagccagctcgccctcctaccacctgtactacggcgcctcggccggctcctaccagttctccatggtgggcggcgagcgctcgccgccgcgcatcctgccgccctgcaccaacgcctccaccggctccgcgctgctcaaccccagcctcccgaaccagagcgacgtggtggaggccgagggcagccacagcaactcccccaccaacatggcgccctccgcgcgcctggaggaggccgtgtggaggccctactga

SEQ ID NO: 172 - DNA, 1389 bp, Homo sapiens
atggacaccaaacatttcctgccgctcgatttctccacccaggtgaactcctccctcacctccccgacggggcgaggctccatggctgccccctcgctgcacccgtccctggggcctggcatcggctccccgggacagctgcattctcccatcagcaccctgagctcccccatcaacggcatgggcccgcctttctcggtcatcagctcccccatgggcccccactccatgtcggtgcccaccacacccaccctgggcttcagcactggcagcccccagctcagctcacctatgaaccccgtcagcagcagcgaggacatcaagccccccctgggcctcaatggcgtcctcaaggtccccgcccacccctcaggaaacatggcttccttcaccaagcacatctgcgccatctgcggggaccgctcctcaggcaagcactatggagtgtacagctgcgaggggtgcaagggcttcttcaagcggacggtgcgcaaggacctgacctacacctgccgcgacaacaaggactgcctgattgacaagcggcagcggaaccggtgccagtactgccgctaccagaagtgcctggccatgggcatgaagcgggaagccgtgcaggaggagcggcagcgtggcaaggaccggaacgagaatgaggtggagtcgaccagcagcgccaacgaggacatgccggtggagaggatcctggaggctgagctggccgtggagcccaagaccgagacctacgtggaggcaaacatggggctgaaccccagctcgccgaacgaccctgtcaccaacatttgccaagcagccgacaaacagcttttcaccctggtggagtgggccaagcggatcccacacttctcagagctgcccctggacgaccaggtcatcctgctgcgggcaggctggaatgagctgctcatcgcctccttctcccaccgctccatcgccgtgaaggacgggatcctcctggccaccgggctgcacgtccaccggaacagcgcccacagcgcaggggtgggcgccatctttgacagggtgctgacggagcttgtgtccaagatgcgggacatgcagatggacaagacggagctgggctgcctgcgcgccatcgtcctctttaaccctgactccaaggggctctcgaacccggccgaggtggaggcgctgagggagaaggtctatgcgtccttggaggcctactgcaagcacaagtacccagagcagccgggaaggttcgctaagctcttgctccgcctgccggctctgcgctccatcgggctcaaatgcctggaacatctcttcttcttcaagctcatcggggacacacccattgacaccttccttatggagatgctggaggcgccgcaccaaatgacttag

SEQ ID NO: 173 - DNA, 13740 bp, Homo sapiens
atggagaccaaggagaacaggtgggtcccggtgaccgtgctccccggctgcgtgggctgcaggaccgtcgcggcgctggcgtcctggaccgtgcgcgatgtgaaggaacgtatcttcgcggagactggcttcccggtgtcggagcagcggctgtggcgcggcggccgcgagttatctgactggatcaagattggagatctgacttccaaaaattgtcatctttttgtaaaccttcaatcaaaaggcttaaaagggggaggtcgatttggtcagacaacgccaccacttgttgattttctcaaggacattttgagaagatatccagaaggaggacagattcttaaggaattaattcagaatgcagaagatgctggggcgacagaagttaaatttttatatgatgaaactcaatacggaacagagactctttggtcaaaagatatggcgccatatcaggggccagctctctatgtgtacaacaacgcggttttcaccccagaggactggcacggcattcaagaaatagcaagaagcaggaaaaaggatgatcctctgaaggtcggaagatttggaattgggtttaattctgtctatcatataacagatgttccttgtatctttagtggtgaccaaatcgggatgctagatcctcatcaaacactttttggcccacatgaatcaggccaatgttggaatctcaaagatgacagcaaagaaattagtgaactttcagaccagtttgcaccatttgttggcatttttggaagcaccaaggaaacatttataaacggcaattttccaggaacatttttccgtttccctcttcgcctacaaccttcacaacttagtagtaacctctacaataagcagaaggttcttgagttgtttgagtcttttagggcagatgcagacacagtgctgctctttctgaaaagtgtgcaggatgtttccttatatgtccgagaggctgacggaacagagaaactggtgtttagagtgacttcgagtgagagtaaggcactgaaacatgagcggccgaattctataaagattctgggaactgctataagtaactattgtaaaaagactccaagcaataacatcacctgtgtaacatatcacgtaaatattgttttagaagaggagagtactaaggatgcacagaaaacatcttggttggtgtgtaacagtgtgggtgggcgagggatcagtagtaagcttgactctttagctgatgaactgaaatttgtcccaatcattggaatagccatgcctttatcaagcagagatgatgaagcaaaaggagcaacgtctgatttctcaggaaaagcattttgtttccttcctttaccacctggtgaggaaagcagcacaggcctcccagttcacatcagtgggttctttggccttactgataaccgcaggagcataaaatggagagagctggaccagtggagagacccggcagccttatggaatgagtttcttgtcatgaatgttgtccccaaagcttatgctactctgatcttagattcaataaaacgtctggagatggaaaagagctctgatttccccttgtcagttgatgttatctataagctttggccggaggcgagcaaagtcaaggtgcactggcaaccggtgttagagcctctattcagcgagctgttgcagaatgcagtgatttattcaattagctgtgactgggtcaggttggagcaggtgtacttctcagaacttgatgaaaatttagaatacacaaaaactgtgctcaactacctccagagctcagggaagcagattgccaaggtaccagggaatgtggatgctgctgttcagctcacagctgcctctggcacaacacctgtgaggaaggtgacgcccgcgtgggtgcggcaggtgctgcggaagtgtgcacacctgggctgtgctgaagaaaagcttcaccttctagaatttgtgctttctgaccaagcctacagtgagctgcttgggctggagctgctccctttacaaaatggcaattttgtccccttctcctcatctgtatcagaccaagatgtcatttatattacctcagcagaatatccaaggtcccttttcccaagtcttgaaggaagatttattttggataacttgaaacctcaccttgtggctgctttaaaggaagctgcccaaacccgaggaagaccatgtactcagctgcagcttctaaatccagaacgatttgcacgtcttatcaaggaagtaatgaatacattctggcctggcagagaattgattgttcaatggtatccatttgatgaaaacagaaatcacccatctgtttcatggcttaagatggtttggaaaaatctttatatacatttttcagaggatttgactttatttgatgagatgccacttatccccagaactatactagaggaaggtcagacatgtgtggaactcattagactcaggattccatcgttagtcattttagacgatgaatctgaagcacagcttccagaatttttagcagacattgtacaaaaacttggagggtttgtccttaaaaaattagatgcatctatacaacatccgcttattaaaaaatatattcattcaccattaccaagtgctgttttgcagataatggagaagatgccattgcagaaattgtgtaatcaaataacttcgctacttccaacacacaaagatgccctgaggaagttcttggctagtttaaccgatagcagtgagaaagagaaaagaattattcaagaattggcaatattcaagcgcattaaccattcttctgatcagggaatttcctcttatacaaaattgaaaggttgtaaagtcttacaccatactgccaaactcccagcagatctgcgactttctatttcagtaatagacagtagtgatgaagctactattcgtctggcaaacatgttgaaaatagaacagttaaagaccactagctgcttaaagcttgttttaaaagatattgaaaatgcattttattcacatgaagaggtaacacagcttatgttatgggtccttgagaatctatcttctcttaaaaatgagaatccaaatgtgcttgagtggttaacaccattaaaattcatccagatatcacaggaacagatggtatcagctggtgaactctttgaccctgatatagaagtactaaaggatctcttttgtaatgaagaaggaacctatttcccaccctcagtttttacctcaccagatattcttcactccttaagacagattggtttaaaaaacgaagccagtctcaaagaaaaggatgttgtgcaagtggcaaaaaaaattgaagccttacaggtcggtgcttgtcctgatcaagatgttcttctgaagaaagccaaaaccctcttactggttttaaataagaatcacacactgttgcaatcatctgaaggaaagatgacattgaagaaaataaaatgggttccagcctgcaaggaaaggcctccaaattatccaggctctttggtctggaaaggagatctctgtaatctctgtgcaccaccagatatgtgtgatgtaggccatgcaattctcattggctcctcacttcctcttgttgaaagtatccatgtaaacctggaaaaagcattagggatcttcacaaaacctagccttagtgctgtcttaaaacactttaaaattgttgttgattggtattcttcaaaaacctttagtgatgaagactactatcaattccagcatattttgcttgagatttacggattcatgcatgatcatctaaatgaagggaaagattcttttagagccttaaaatttccatgggtttggactggcaaaaagttttgtccacttgcccaggctgtgattaaaccaatccatgatcttgaccttcagccttatttgcataatgtacctaaaaccatggcaaaattccaccaactatttaaggtctgtggttcaatagaggagttgacatcagatcatatttccatggttattcagaagatatatctcaaaagtgaccaagatctcagtgaacaagaaagcaaacaaaatcttcatcttatgttgaatattatcagatggctgtatagcaatcagattccagcaagccccaacacaccagttcctatacatcatagcaaaaatccttctaaacttatcatgaagccaattcacgaatgctgttattgtgacattaaagttgatgaccttaatgacttacttgaagattctgtggaaccaatcattttggtgcatgaggacatacccatgaaaactgcagaatggctaaaagttccatgccttagtacaagactgataaatcctgaaaacatgggatttgagcagtcaggacaaagagagccacttactgtaagaattaaaaatattctggaagaatacccttcagtgtcagatatttttaaagaactacttcaaaacgctgatgatgcaaatgcaacagaatgcagtttcttgattgatatgagaagaaatatggacataagagagaatctcctagacccagggatggcagcttgtcatggacctgctttgtggtcattcaacaattctcaattctcagattcagattttgtgaacataactaggttaggagaatctttaaaaaggggagaagttgacaaagttggaaaatttggtcttggatttaattctgtgtaccatatcactgacattcccatcattatgagtcgggaattcatgataatgttcgatccaaacataaatcatatcagtaaacacattaaagacaaatccaatcctgggatcaaaattaattggagtaaacaacagaaaagacttagaaaatttcctaatcagttcaaaccatttatagatgtatttggctgtcagttacctttgactgtagaagcaccttacagctataatggaacccttttccgactgtcctttagaactcaacaggaagcaaaagtgagtgaagttagtagtacgtgctacaatacagcagatatttattctcttgtggatgaatttagtctctgtggacacaggcttatcattttcactcagagtgtaaagtcaatgtatttgaagtacttgaaaattgaggaaaccaaccccagtttagcacaagatacagtaataattaaaaaaaaatcctgctcttccaaagcattgaacacacctgtcttaagtgttttaaaagaggctgctaagctcatgaagacttgcagcagcagtaataaaaagcttcccagtgatgaaccaaagtcatcttgcattcttcagatcacagtggaagaatttcaccatgtgttcagaaggattgctgatttacagtcgccactttttagaggtccagatgatgacccagctgctctctttgaaatggctaagtctggccaatcaaaaaagccatcagatgagttgtcacagaaaacagtagagtgtaccacgtggcttctgtgtacttgcatggacacaggagaggctctgaagttttccctgagtgagagtggaagaagactaggactggttccatgtggggcagtaggagttcagctgtcagaaatccaggaccagaagtggacagtgaaaccacacattggagaggtgttttgctatttacctttacgaataaaaacaggcttgccagttcatatcaatgggtgctttgctgttacatcaaataggaaagaaatctggaaaacagatacaaaaggacgatggaataccacgttcatgagacatgttattgtgaaagcttacttacaggtactgagtgtcttacgggacctggccactagtggggagctaatggattatacttactatgcagtatggcccgatcctgatttagttcatgatgatttttctgtaatttgccaaggattttatgaagatatagctcatggaaaagggaaagaactgaccaaagtcttctctgatggatctacttgggtttccatgaagaacgtaagatttctagatgactctatacttaaaagaagagatgttggttcagcagccttcaagatatttttgaaatacctcaagaagactgggtccaaaaacctttgtgctgttgaacttccttcttcggtaaaattaggatttgaagaagctggctgcaaacagatactacttgaaaacacattttcagagaaacagtttttttctgaagtgttttttccaaatattcaagaaattgaagcagaacttagagatcctttaatgatctttgttctaaatgaaaaagttgatgagttctcgggagttcttcgtgttactccatgtattccttgttccttggaggggcatcctttggttttgccatcaagattgatccaccccgaaggacgagttgcaaagttatttgatattaaagatgggagattcccttatggttctactcaggattatctcaatcctattattttgattaaactagttcagttaggtatggcaaaagatgatattttatgggatgatatgctagaacgtgcagtgtcagtagctgaaattaataaaagtgatcatgttgctgcatgcctaagaagtagtatcttattgagtcttatcgatgagaaactaaaaataagggatcctagagcaaaggattttgctgcaaaatatcaaacaatccgcttccttccatttctgacaaaaccagcaggtttttctttggactggaaaggcaacagttttaagcctgaaaccatgtttgcagcaactgacctttatacagctgaacatcaagatatagtttgtcttttgcaaccaattctaaatgaaaattcccattcttttagaggttgtggttcagtgtcattggctgttaaagagtttttgggattactcaagaagccaacagttgatctggttataaaccaattgaaagaagtagcaaaatcagttgatgatggaattacactgtaccaggagaatatcaccaatgcttgctacaaataccttcatgaagccttgatgcaaaatgaaatcactaagatgtcaattattgataagttaaaaccctttagcttcattctagttgagaatgcatatgttgactcagaaaaggtttcttttcatttaaattttgaggcggcaccatacctttatcagttgcctaataagtataaaaataatttccgcgaactttttgaaaccgtgggtgtgaggcagtcatgcactgttgaagattttgctcttgttttggaatctattgatcaagaaagaggaacaaagcaaataacagaagagaattttcagctttgccgacgaataatcagtgaaggaatatggagtctcattagagaaaagaaacaagaattttgtgagaaaaattatggcaagatattattgccagatactaatcttatgcttctccctgctaaatcgttatgctacaatgattgcccttggataaaagtaaaggataccactgtaaaatattgtcatgctgacatacccagggaagtagcagtaaaactaggagcagtcccaaagcgacacaaagccttagaaagatatgcatccaatgtctgttttacaacacttggcacagaatttgggcagaaagaaaaattgaccagcagaattaagagcatccttaatgcatatccttctgaaaaggaaatgttgaaagagcttcttcaaaatgctgatgatgcaaaggcgacagaaatctgttttgtgtttgatcctagacagcatccagttgatagaatatttgatgataagtgggccccattgcaagggccagcactttgtgtgtacaacaaccagccatttacagaagatgatgttagaggaattcagaatcttggaaaaggcacgaaagagggaaatccttataaaactggacagtatggaataggattcaattctgtgtatcatatcacagactgcccatcttttatttctggcaatgacatcctgtgtatttttgatcctcatgccagatatgcaccaggggccacatccattagtcccggacgcatgtttagagatttggatgcagattttaggacacagttctcagatgttctggatctttatctgggaacccattttaaactggataattgcacaatgttcagatttcctcttcgtaatgcagaaatggcaaaagtttcggaaatttcgtctgttccagcatcagacagaatggtccagaatcttttggacaaactgcgctcagatggggcagaacttctaatgtttcttaatcacatggaaaaaatttctatttgtgaaatagataagagtactggagctctaaatgtgctgtattcagtaaagggcaaaatcacagatggagacagattgaaaaggaaacaatttcatgcatctgtaattgatagtgttactaaaaagaggcagctcaaagacataccagttcaacaaataacctatactatggatactgaggactctgaaggaaatcttactacgtggctaatttgtaatagatcaggcttttcaagtatggagaaagtatctaaaagtgtcatatcagctcacaagaaccaagatattactcttttcccacgtggtggagtagctgcctgcattactcacaactataaaaaaccccatagggccttctgttttttgcctctttctttggagactgggctgccatttcatgtgaatggccactttgcactggattcagccagaaggaacctgtggcgtgatgataatggagttggtgttcgaagtgactggaataacagtttaatgacagcattaatagctcctgcatatgttgaattgctaatacagttaaaaaaacggtatttccctggttctgatccaacattatcagtgttacagaacacccctattcatgttgtaaaggacactttaaagaagtttttatcgtttttcccagttaaccgtcttgatctacagccagatttatattgtctagtgaaagcactttacaattgcattcacgaagacatgaaacgtcttttacctgttgtgcgggctccaaatattgatggctctgacttgcactctgcagttataattacttggatcaatatgtctacttctaataaaactagaccattttttgacaatttactacaggatgaattacaacaccttaaaaatgcagattataatatcaccacacgcaaaacagtagcagagaatgtctataggctgaaacatctccttttagaaattggtttcaacttggtttataactgtgatgaaactgctaatctttaccactgtcttatagatgcagatattcctgttagttatgtgacccctgctgatatcagatcttttttaatgacattttcctctcctgacactaattgccatattgggaagctgccttgtcgtctgcagcagactaatctaaaactttttcatagtttaaaacttttagttgattattgttttaaagatgcagaagaaaatgagattgaagttgagggattgccccttctcatcacactggacagtgttttgcaaacttttgatgcaaaacgacccaagtttctaacaacatatcatgaattgattccatcccgcaaagacttgtttatgaatacattatatttgaaatatagtaatattttattgaactgtaaagttgcaaaagtgtttgacatttccagctttgctgatttgttatcctctgtgttgcctcgagaatataagaccaaaagttgcacaaagtggaaagacaattttgcaagtgagtcttggcttaagaatgcatggcattttattagtgaatctgtaagtgtgaaagaagatcaggaagaaacaaaaccaacatttgacattgttgttgatactctaaaagactgggcattgcttccaggaacaaagtttactgtttcagccaaccagcttgtggttcctgaaggagatgttctgcttcctctcagccttatgcacattgcagtttttccaaatgcccagagtgataaagtttttcatgctctaatgaaagctggctgtattcagcttgctttgaacaaaatctgttccaaagacagtgcatttgttcctttgttgtcatgtcacacagcaaatatagagagccccacaagcatcttgaaggctctacattatatggtccaaacttcaacatttagagcagaaaaattagtagaaaatgattttgaggcacttttgatgtatttcaactgcaatttgaatcatttgatgtcccaagatgatataaaaattctaaagtcacttccgtgctataaatccatcagtggccgctatgtaagcattggaaaatttggaacatgctacgtacttacaaaaagtatcccttcagctgaagtggagaaatggacacagtcatcatcatctgcatttcttgaagaaaaaatacacttaaaagaactatatgaggtgattggttgtgtacctgtagatgatcttgaggtatatttgaaacacctcttaccaaaaattgaaaatctctcttatgatgcaaaattagagcacttgatctaccttaagaatagattatcaagtgctgaggaattatcagagattaaggaacaactttttgaaaaactggaaagtttattgataatccatgatgctaacagtagactaaagcaagcaaagcatttctatgatagaactgtgagagtttttgaagttatgcttcctgaaaaattgtttattcctaatgatttctttaagaaattggaacaacttataaaacccaaaaatcatgttacatttatgacatcctgggtggaattcttaagaaatattggactaaaatacatactttctcagcagcagttgttacagtttgctaaggaaatcagtgtgagggctaatacagaaaactggtccaaagaaacattgcaaaatacagttgatatccttctgcatcatatattccaagaacgaatggatttgttatctggaaattttctgaaagaactatctttaataccattcttatgtcctgagcgggcccccgcggaattcattagatttcatcctcaatatcaagaggtaaatggaacacttcctcttataaagttcaatggagcacaggtaaatccaaaattcaagcaatgtgatgtactccagctgttatggacatcctgccctattcttccagagaaagctacacccttaagcattaaagaacaagaaggtagtgaccttggtccacaagaacagcttgaacaagttttaaatatgcttaatgttaacctggatcctcctcttgataaggtaatcaataactgcagaaacatatgcaacataacgacgttggatgaagaaatggtaaaaactagagcaaaagtcttaaggagcatatatgaattcctcagtgcagaaaaaagggaatttcgttttcagttgcgaggggttgcttttgtgatggtagaagatggttggaaacttctgaagcctgaggaggtagtcataaacctagaatatgaatctgattttaaaccttatttgtacaagctacctttagaacttggcacatttcaccagttgttcaaacacttaggtactgaagatattatttcaactaagcaatatgttgaagtgttgagccgcatatttaaaaattctgagggcaaacaattagatcctaatgaaatgcgtacagttaagagagtagtttctggtctgttcaggagtctacagaatgattcagtcaaggtgaggagtgatctcgagaatgtacgagaccttgcgctttacctcccaagccaggatggtagattggtaaagtcaagcatcttagtgtttgacgatgcgccacattataaaagtagaatccaggggaatattggtgtgcaaatgttagttgatctcagccagtgctacttagggaaagaccatggatttcacactaagttgataatgctctttcctcaaaaacttagacctcgattattgagcagtatacttgaagaacaattagatgaagagactcccaaagtttgtcagtttggagcgttgtgttctcttcaaggaagattgcagttactcttgtcttctgaacagttcattacaggactgattagaattatgaagcatgaaaatgataatgcttttctggccaatgaagaaaaagccataagactttgcaaagccctaagagaaggattgaaagtatcctgctttgaaaagcttcaaacaacattaagagttaaaggttttaatcctattccccacagcagaagtgaaacttttgcttttttgaagcgatttggtaatgcagtcatcttgctctacattcaacattcagacagtaaagacattaatttcctgttagcattggcaatgactcttaaatcagcaactgacaatttgatttctgacacttcatatttaattgctatgctaggatgcaatgatatttacaggattggtgagaaacttgacagtttaggagtgaaatatgactcttcggagccatcaaaactggaacttccaatgcctggcacaccaattcctgctgaaattcattacactctgcttatggacccaatgaatgttttttacccgggagaatatgttgggtaccttgttgatgctgaaggtggtgatatctatggatcataccagccaacatacacatatgcaattattgtacaagaagttgaaagagaagatgctgacaattctagttttctaggaaagatatatcagatagatattggttatagtgaatataaaatagttagctctcttgatctgtataagttttcaagacctgaggaaagctctcaaagcagggacagtgctccttctacaccaaccagccccactgagttcctcacccctggcctgagaagcattcctcctcttttctctggtagagagagccacaagacttcttccaaacatcagtcccccaaaaagcttaaggttaattctttaccagaaatcttaaaagaagtgacatctgtggtggagcaagcatggaagcttccagaatcggaacgaaaaaagattattaggcggttgtatttgaaatggcatcctgacaaaaatccagagaaccatgacattgccaatgaagtttttaaacatttgcagaatgaaatcaacagattagaaaaacaggcttttctagatcaaaatgcagacagggcctccagacgaacattttcaacctcagcatcccgatttcagtcagacaaatactcatttcagagattctatacttcatggaatcaagaagcaacgagccataaatctgaaagacagcaacagaacaaagaaaaatgccccccttcagccggacagacttactctcaaaggttctttgttcctcccactttcaagtcggttggcaatccagtggaagcacgcagatggctaagacaagccagagcaaacttctcagctgccaggaatgaccttcataaaaatgccaatgagtgggtgtgctttaaatgttacctttctaccaagttagctttgattgcagctgactatgctgtgaggggaaagtctgataaagatgtaaaaccaactgcacttgctcagaaaatagaggaatatagtcagcaacttgaaggactgacaaatgatgttcacacattggaagcttatggtgtagacagtttaaaaacaagataccctgatttgcttccctttcctcagatcccaaatgacaggttcacttctgaggttgctatgagggtgatggaatgtactgcctgtatcataataaaacttgaaaattttatgcaacaaaaagtgtga

SEQ ID NO: 174 - DNA, 2493 bp, Homo sapiens
atggccaactgccaaatagccatcttgtaccagagattccagagagtggtctttggaatttcccaactcctttgcttcagtgccctgatctctgaactaacaaaccagaaagaagtggcagcatggacttatcattacagcacaaaagcatactcatggaatatttcccgtaaatactgccagaatcgctacacagacttagtggccatccagaataaaaatgaaattgattacctcaataaggtcctaccctactacagctcctactactggattgggatccgaaagaacaataagacatggacatgggtgggaaccaaaaaggctctcaccaacgaggctgagaactgggctgataatgaacctaacaacaaaaggaacaacgaggactgcgtggagatatacatcaagagtccgtcagcccctggcaagtggaatgatgagcactgcttgaagaaaaagcacgcattgtgttacacagcctcctgccaggacatgtcctgcagcaaacaaggagagtgcctcgagaccatcgggaactacacctgctcctgttaccctggattctatgggccagaatgtgaatacgtgagagagtgtggagaacttgagctccctcaacacgtgctcatgaactgcagccaccctctgggaaacttctcttttaactcgcagtgcagcttccactgcactgacgggtaccaagtaaatgggcccagcaagctggaatgcttggcttctggaatctggacaaataagcctccacagtgtttagctgcccagtgcccacccctgaagattcctgaacgaggaaacatgacctgccttcattctgcaaaagcattccagcatcagtctagctgcagcttcagttgtgaagagggatttgcattagttggaccggaagtggtgcaatgcacagcctcgggggtatggacagccccagccccagtgtgtaaagctgtgcagtgtcagcacctggaagcccccagtgaaggaaccatggactgtgttcatccgctcactgcttttgcctatggctccagctgtaaatttgagtgccagcccggctacagagtgaggggcttggacatgctccgctgcattgactctggacactggtctgcacccttgccaacctgtgaggctatttcgtgtgagccgctggagagtcctgtccacggaagcatggattgctctccatccttgagagcgtttcagtatgacaccaactgtagcttccgctgtgctgaaggtttcatgctgagaggagccgatatagttcggtgtgataacttgggacagtggacagcaccagccccagtctgtcaagctttgcagtgccaggatctcccagttccaaatgaggcccgggtgaactgctcccaccccttcggtgcctttaggtaccagtcagtctgcagcttcacctgcaatgaaggcttgctcctggtgggagcaagtgtgctacagtgcttggctactggaaactggaattctgttcctccagaatgccaagccattccctgcacacctttgctaagccctcagaatggaacaatgacctgtgttcaacctcttggaagttccagttataaatccacatgtcaattcatctgtgacgagggatattctttgtctggaccagaaagattggattgtactcgatcgggacgctggacagactccccaccaatgtgtgaagccatcaagtgcccagaactctttgccccagagcagggcagcctggattgttctgacactcgtggagaattcaatgttggctccacctgccatttctcttgtgacaacggctttaagctggaggggcccaataatgtggaatgcacaacttctggaagatggtcagctactccaccaacctgcaaaggcatagcatcacttcctactccaggggtgcaatgtccagccctcaccactcctgggcagggaaccatgtactgtaggcatcatccgggaacctttggttttaataccacttgttactttggctgcaacgctggattcacactcataggagacagcactctcagctgcagaccttcaggacaatggacagcagtaactccagcatgcagagctgtgaaatgctcagaactacatgttaataagccaatagcgatgaactgctccaacctctggggaaacttcagttatggatcaatctgctctttccattgtctagagggccagttacttaatggctctgcacaaacagcatgccaagagaatggccactggtcaactaccgtgccaacctgccaagcaggaccattgactatccaggaagccctgacttactttggtggagcggtggcttctacgataggtctgataatgggtgggacgctcctggctttgctaagaaagcgtttcagacaaaaagatgatgggaaatgccccttgaatcctcacagccacctaggaacatatggagtttttacaaacgctgcatttgacccgagtccttaa

SEQ ID NO: 175 - DNA, 1176 bp, Homo sapiens
atggattcacttggcgccgtcagcactcgacttgggtttgatcttttcaaagagctgaagaaaacaaatgatggcaacatcttcttttcccctgtgggcatcttgactgcaattggcatggtcctcctggggacccgaggagccaccgcttcccagttggaggaggtgtttcactctgaaaaagagacgaagagctcaagaataaaggctgaagaaaaagaggtgattgagaacacagaagcagtacatcaacaattccaaaagtttttgactgaaataagcaaactcactaatgattatgaactgaacataaccaacaggctgtttggagaaaaaacatacctcttccttcaaaaatacttagattatgttgaaaaatattatcatgcatctctggaacctgttgattttgtaaatgcagccgatgaaagtcgaaagaagattaattcctgggttgaaagcaaaacaaatgaaaaaatcaaggacttgttcccagatggctctattagtagctctaccaagctggtgctggtgaacatggtttattttaaagggcaatgggacagggagtttaagaaagaaaatactaaggaagagaaattttggatgaataagagcacaagtaaatctgtacagatgatgacacagagccattcctttagcttcactttcctggaggacttgcaggccaaaattctagggattccatataaaaacaacgacctaagcatgtttgtgcttctgcccaacgacatcgatggcctggagaagataatagataaaataagtcctgagaaattggtagagtggactagtccagggcatatggaagaaagaaaggtgaatctgcacttgccccggtttgaggtggaggacggttacgatctagaggcggtcctggctgccatggggatgggcgatgccttcagtgagcacaaagccgactactcgggaatgtcgtcaggctccgggttgtacgcccagaagttcctgcacagttcctttgtggcagtaactgaggaaggcaccgaggctgcagctgccaccggcataggctttactgtcacatccgccccaggtcatgaaaatgttcactgcaatcatcccttcctgttcttcatcaggcacaatgaatccaacagcatcctcttcttcggcagattttcttctccttaa

SEQ ID NO: 176 - DNA, 7695 bp, Homo sapiens
atgaagcagctgcagccgcagccgcctccgaagatgggggatttctacgacccggagcacccgacccctgaagaagaagaaaatgaggcaaagattgaaaatgtgcagaaaacaggtttcatcaaaggaccaatgttcaaaggtgttgcttctagtcgatttttgcccaaaggcaccaaaacaaaagttaatttggaagaacagggacgacagaaggtgtcattcagcttcagccttacaaagaaaactttgcagaataggtttctcactgcacttggcaatgaaaagcaaagtgatactccaaaccctccagctgtacctcttcaggtagactcgactcctaaaatgaaaatggaaattggtgataccttatctactgcagaagaatcttccccaccaaagtcaagggtggaattgggcaaaattcattttaagaaacatctgcttcatgtaacatccaggccactgctggctactaccacagcagtagcatctccacctactcatgcagcaccattaccagcagtgatagcagaatcaacaactgtagactcaccgccctcatctccgcctccaccgcctccacctgcccaagccacaacactctcatcaccagcaccagtaacagagccagtggccttgccacatacaccaataacagttctaatggcagcaccagtacccttaccagtagatgtagcagttagatctctgaaagaaccaccaattataattgtaccagaatctttagaagcagatactaagcaggacactatatctaatagtttagaagaacacgtaactcaaatattgaatgagcaagcagatatttcctcaaaaaaagaagattcccatattgggaaggatgaagaaattccagatagttctaagattagtctgagctgtaaaaaaacaggttctaagaagaaatcctcacaatctgaaggcatctttcttggttcagaatctgatgaagattctgtacggacttcttcaagtcaaagatcacatgatttaaaattttcagcaagcattgaaaaggaaagagattttaaaaagagctcagcacctttaaaaagtgaggatctagggaaaccttcacgatctaaaacagacagagatgataaatattttagctattcaaaacttgaaagagatactcggtatgtatcttcccgatgtagatcagaaagagagcgacggcggagcagatctcactctaggtctgagagaggctctagaactaatttatcctattccaggtcagaacgatctcattattatgactctgatcgtcgctaccataggagctccccttatcgagagaggacgcgctattctcggccatacacagataacagagcacgagagagttctgactcagaagaagagtataagaagacatactcaaggcgtacctcatctcattcctcttcttacagagacctaaggacatcatcctattctaaatctgatcgggactgtaaaactgagacctcttacttagagatggaaagaagaggcaagtattcttcaaaactagaaagagaatctaaaaggacttcagaaaatgaagcaattaaaagatgttgttctccccctaatgaactgggattccgacgagggtcatcatattctaagcatgacagtagtgcttcccgttataaatctaccctttcaaaacctatacccaagtctgataaatttaaaaattctttctgttgtacagaattaaatgaagaaatcaaacagtctcattcttttagtttacagacaccttgttcaaaaggtagtgaattaagaatgattaataaaaatcctgaaagagaaaaggctgggtctccagctccatcaaatcgattaaatgattcacctactttaaaaaagctagatgaattgcctatttttaagtccgaatttataacacatgatagccatgatagtattaaggaattagactctttatctaaagtgaagaatgatcaattaagaagtttttgtcccatagaattaaatataaatggatctcctggggcagaatctgatttggcaacattttgcacttctaaaactgatgctgttttaatgacttctgatgatagtgtgactggatcggaattatcccctttggtcaaagcatgcatgctttcatcaaatggatttcagaatattagtaggtgcaaagaaaaagacttggatgatacctgcatgctgcataagaagtcagaaagcccatttagagaaacagaacctctggtgtcaccacaccaagataaactcatgtctatgccagttatgactgtggattattccaaaacagtagttaaagaaccagttgatacgagggtttcttgctgcaaaaccaaagattcagacatatactgtactttgaacgatagcaacccttctttgtgtaactctgaagctgaaaatattgagccttcagttatgaagatttcttcaaatagctttatgaatgtgcatttggaatcaaaaccagttatatgtgatagtagaaatttgacagatcactcaaaatttgcatgtgaagaatataagcagagcatcggtagcactagttcagcttctgttaatcattttgatgatttatatcaacctattgggagttcaggtattgcttcatctcttcagagtcttccaccaggaataaaggtggacagtctaactctcttgaaatgcggagagaacacatctccagttctggatgcagtgctaaagagtaaaaaaagttcagagtttttaaagcatgcagggaaagaaacaatagtagaagtaggtagtgaccttcctgattcaggaaagggatttgcttccagggagaacaggcgtaataatgggttatctgggaaatgtttgcaagaggctcaagaagaagggaattccatattgcctgaaagaagaggaagaccagaaatctctttagatgaaagaggagaaggaggacatgtgcatacttctgatgactcagaagttgtattttcttcttgtgatttgaatttaaccatggaagacagtgatggtgtaacttatgcattaaagtgtgacagtagtggtcatgccccagaaattgtgtctacagttcatgaagattattctggctcttctgaaagttcaaatgatgaaagtgattcagaagatacagattcggatgatagcagtattccaagaaaccgtctccagtctgttgtggttgtgccaaagaattctactttgcccatggaagaaacaagtccttgttcttctcggagcagtcaaagttatagacactattctgaccattgggaagatgagagattggagtcaaggagacatttgtatgaggaaaaatttgaaagtatagcaagtaaagcctgtcctcaaactgataagtttttccttcataaaggaacagagaagaatccggaaatttcttttacacagtccagtagaaaacaaatagataatcgcctgcctgaactttctcatcctcagagtgatggggttgatagtacaagtcatacagatgtgaaatctgaccctctgggtcacccaaattcagaggaaaccgtgaaagccaaaataccttctaggcagcaagaagagctgccaatttattcttctgattttgaagatgtcccaaataagtcttggcaacagaccactttccaaaacaggccagatagtagactgggaaaaacagaattgagtttttcttcctcttgtgagataccacatgtggatggcttgcactcatcagaagagctcagaaacttaggttgggacttctctcaagaaaagccttctaccacgtatcagcaacctgacagtagctatggagcttgtggtggacacaagtatcagcaaaatgcagaacagtatggtgggacacgtgattactggcaaggcaatggttactgggatccaagatcaggtagacctcctggaactggggttgtgtatgatcgaactcaaggacaagtaccagattccctaacagatgatcgtgaagaagaggagaattgggatcaacaggatggatcccatttttcagaccagtccgataaatttcttctatcccttcagaaagacaaggggtcagtgcaagcacctgaaataagcagcaattccattaaggacactttagctgtgaatgaaaagaaagatttttcaaaaaacttagaaaaaaatgatatcaaagatagagggcctcttaaaaaaaggaggcaggaaatagagagtgattctgaaagtgatggtgagcttcaggacagaaagaaagttagagtggaggtagagcagggagagacatcagtgcccccaggttcagcactggttgggccctcctgtgtcatggatgacttcagggacccacagcgatggaaggaatgtgccaagcaagggaaaatgccatgttactttgatcttattgaagaaaatgtttatttaacagaaagaaagaagaataaatctcatcgagatattaagcgaatgcagtgtgagtgtacacctctttctaaagatgaaagagctcaaggtgaaatagcatgtggggaagattgtcttaatcgtcttctcatgattgaatgttcttctcggtgtccaaatggggattattgttccaatagacggtttcagagaaaacagcatgcagatgtggaagtcatactcacagaaaagaaaggctggggcttgagagctgccaaagaccttccttcgaacacctttgtcctagaatattgtggagaggtactcgatcataaagagtttaaagctcgagtgaaggagtatgcacgaaacaaaaacatccattactatttcatggccctgaagaatgatgagataatagatgccactcaaaaaggaaattgctctcgtttcatgaatcacagctgtgaaccaaattgtgaaacccaaaaatggactgtgaacggacaactgagggttgggttttttaccaccaaactggttccttcaggctcagagttaacgtttgactatcagttccagagatatggaaaagaagcccagaaatgtttctgcggatcagccaattgccggggttacctgggaggagaaaacagagtcagcatcagagcagcaggagggaaaatgaagaaggaacgatctcgtaagaaggattcagtggatggagagctagaagctctgatggaaaatggtgagggtctctctgataaaaaccaggtgctcagcttatcccggctaatggttagaattgaaactttggagcagaaacttacctgtctggaactcatacagaacacacactcacagtcctgcctgaagtcctttctggaacgtcatgggctgtctttgttgtggatctggatggcagagctaggtgacggccgggaaagtaaccagaagcttcaggaagagattataaagactttggaacacttgcccattcctactaaaaatatgttggaggaaagcaaagtacttccaattattcaacgctggtctcagactaagactgctgtccctccgttgagtgaaggagatgggtattctagtgagaatacatcgcgtgctcatacaccactcaacacacctgatccttccaccaagctgagcacagaagctgacacagacactcccaagaaactaatgtttcgcagactgaaaattataagtgaaaatagcatggacagtgcaatctctgatgcaaccagtgagctagaaggcaaggatggcaaagaggatcttgatcaattagaaaatgtccctgtagaggaagaggaagaattgcagtcacaacagctactcccacaacagctgcctgaatgcaaagttgatagtgaaaccaacatagaagctagtaagctacctacatctgaaccagaagctgacgctgaaatagagcccaaagagagcaacggcacaaaactagaagaacctattaatgaagaaacaccatcccaagatgaagaggagggtgtgtctgatgtggagagtgaaaggagccaagaacagccagataaaacagtggatataagtgatttggccaccaaactcctggacagttggaaagacctaaaggaggtatatcgaattccaaagaaaagtcaaactgaaaaggaaaacacaacaactgaacgaggaagggatgctgttggcttcagagatcaaacacctgccccgaagactcctaataggtcaagagagagagacccagacaagcaaactcaaaataaagagaaaaggaaacgaagaagctccctctcaccaccctcttctgcctatgagcggggaacaaaaaggccagatgacagatatgatacaccaacttctaaaaagaaagtacgaattaaagaccgcaataaactttctacagaggaacgccggaagttgtttgagcaagaggtggctcaacgggaggctcagaaacaacagcaacagatgcagaacctgggaatgacatcaccactgccctatgactctcttggttataatgccccgcatcatccctttgctggttacccaccaggttatcccatgcaggcctatgtggatcccagcaaccctaatgctggaaaggtgctcctgcccacacccagcatggacccagtgtgttctcctgctccttatgatcatgctcagcccttggtgggacattctacagaacccctttctgcccctccaccagtaccagtggtgccacatgtggcagctcctgtggaagtttccagttcccagtatgtggcccagagtgatggtgtagtacaccaagactccagcgttgctgtcttgccagtgccggcccccggcccagttcagggacagaattatagtgtttgggattcaaaccaacagtctgtcagtgtacagcagcagtactctcctgcacagtctcaagcaaccatatattatcaaggacagacatgtccaacagtctatggtgtgacatcaccttattcacagacaactccaccaattgtacagagttatgcccagccaagtcttcagtatatccaggggcaacagattttcacagctcatccacaaggagtggtggtacagccagccgcagcagtgactacaatagttgcaccagggcagcctcagcccttgcagccatctgaaatggttgtgacaaataatctcttggatctgccgcccccctctcctcccaaaccaaaaaccattgtcttacctcccaactggaagacagctcgagatccagaagggaagatttattactaccatgtgatcacaaggcagactcagtgggatcctcctacttgggaaagcccaggagatgatgccagccttgagcatgaagctgagatggacctgggaactccaacatatgatgaaaaccccatgaaggcctcgaaaaagcccaagacagcagaagcagacacctccagtgaactagcaaagaaaagcaaagaagtattcagaaaagagatgtcccagttcatcgtccagtgcctgaacccttaccggaaacctgactgcaaagtgggaagaattaccacaactgaagactttaaacatctggctcgcaagctgactcacggtgttatgaataaggagctgaagtactgtaagaatcctgaggacctggagtgcaatgagaatgtgaaacacaaaaccaaggagtacattaagaagtacatgcagaagtttggggctgtttacaaacccaaagaggacactgaattagagtga

SEQ ID NO: 177 - DNA, 3876 bp, Homo sapiens
atgtcttcccttcctgggtgcattggtttggatgcagcaacagctacagtggagtctgaagagattgcagagctgcaacaggcagtggttgaggaactgggtatctctatggaggaacttcggcatttcatcgatgaggaactggagaagatggattgtgtacagcaacgcaagaagcagctagcagagttagagacatgggtaatacagaaagaatctgaggtggctcacgttgaccaactctttgatgatgcatccagggcagtgactaattgtgagtctttggtgaaggacttctactccaagctgggactacaataccgggacagtagctctgaggacgaatcttcccggcctacagaaataattgagattcctgatgaagatgatgatgtcctcagtattgattcaggtgatgctgggagcagaactccaaaagaccagaagctccgtgaagctatggctgccttaagaaagtcagctcaagatgttcagaagttcatggatgctgtcaacaagaagagcagttcccaggatctgcataaaggaaccttgagtcagatgtctggagaactaagcaaagatggtgacctgatagtcagcatgcgaattctgggcaagaagagaactaagacttggcacaaaggcacccttattgccatccagacagttgggccagggaagaaatacaaggtgaaatttgacaacaaaggaaagagtctactgtcggggaaccatattgcctatgattaccaccctcctgctgacaagctgtatgtgggcagtcgggtggtcgccaaatacaaagatgggaatcaggtctggctctatgctggcattgtagctgagacaccaaacgtcaaaaacaagctcaggtttctcattttctttgatgatggctatgcttcctatgtcacacagtcggaactgtatcccatttgccggccactgaaaaagacttgggaggacatagaagacatctcctgccgtgacttcatagaggagtatgtcactgcctaccccaaccgccccatggtactgctcaagagtggccagcttatcaagactgagtgggaaggcacgtggtggaagtcccgagttgaggaggtggatggcagcctagtcaggatcctcttcctggatgacaaaagatgtgagtggatctatcgaggctctacacggctggagcccatgttcagcatgaaaacatcctcagcctctgcactggagaagaagcaaggacagctcaggacacgtccaaatatgggtgctgtgaggagcaaaggccctgttgtccagtacacacaggatctgaccggtactggaacccagttcaagccagtggaacccccacagcctacagctccacctgccccacctttcccacctgctccacctctatccccccaagcaggtgacagtgacttggaaagccagcttgcccagtcacggaagcaggtagccaaaaagagcacgtcctttcgaccaggatctgtgggctctggtcattcctcccctacatctcctgcactcagtgaaaatgtctctggtgggaaacctgggatcaaccagacatatagatcacctttaggctccacagcctctgccccagcaccctcagcactcccggcccctccagcacccccagtcttccatggcatgctggagcgggccccagcagagccctcctaccgtgctcccatggagaagcttttctacttacctcatgtctgcagctatacctgtctgtctcgagtcagacctatgaggaatgagcagtaccggggcaagaaccctctgctggtcccgttactatatgacttccggcggatgacagcccggcgtcgagttaaccgcaagatgggctttcatgttatctataagacaccttgtggtctctgccttcggacaatgcaggagatagaacgctaccttttcgagactggctgtgacttcctcttcctggagatgttctgtttggatccatatgttcttgtggaccgaaagtttcagccctataagcctttttactatattttggacatcacttatgggaaggaagatgttcccctatcctgtgtcaatgagattgacacaacccctccaccccaggtggcctacagcaaggaacgtatcccgggcaagggtgttttcattaacacaggccctgaatttctggttggctgtgactgcaaggatgggtgtcgggacaagtccaagtgtgcctgccatcaactaactatccaggctacagcctgtaccccaggaggccaaatcaaccctaactctggctaccagtacaagagactagaagagtgtctacccacaggggtatatgagtgtaacaaacgctgcaaatgtgacccaaacatgtgcacaaaccggttggtgcaacatggactacaagttcggctacagctattcaagacacagaacaagggctggggtatccgctgcttggatgacattgccaaaggctcttttgtttgtatttatgcaggcaaaatcctgacagatgactttgcagacaaggagggtctggaaatgggtgatgagtactttgcaaatctggaccatatcgagagcgtggagaacttcaaagaaggatatgagagtgatgccccctgttcctctgacagcagtggtgtagacttgaaggaccaggaagatggcaacagcggtacagaggaccctgaagagtccaatgatgatagctcagatgataacttctgtaaggatgaggacttcagcaccagttcagtgtggcggagctatgctacccggaggcagacccggggccagaaagagaacggactctctgagacaacttccaaggactcccaccccccagatcttggacccccacatattcctgttcctccctcaatccctgtaggtggctgcaatccaccttcctccgaagagacacccaagaacaaggtggcctcatggttgagctgcaatagtgtcagtgaaggtggttttgctgactctgatagccattcatccttcaagactaatgaaggtggggagggccgggctgggggaagccgaatggaggctgagaaggcctccacctcaggactaggcatcaaggatgagggagacatcaaacaggccaagaaagaggacactgacgaccgaaacaagatgtcagtagttactgaaagctctcgaaattacggttacaatccttctcctgtgaagcctgaaggacttcgccgcccacctagtaagactagtatgcatcaaagccgaagactcatggcttctgctcagtccaaccctgatgatgtcctgacactgtccagcagcacagaaagtgagggggaaagtgggaccagccgaaagcccactgctggtcagacttcggctacagcggttgacagtgatgatatccagaccatatcctctggctctgaaggggatgactttgaggacaagaagaacatgactggtccaatgaagcgtcaagtggcagtaaaatcaacccgaggctttgctcttaaatcaacccatgggattgcaattaaatcaaccaacatggcctctgtggacaagggggagagcgcacctgttcgtaagaacacacgccaattctatgatggcgaggagtcttgctacatcattgatgccaagcttgaaggcaacctgggccgctacctcaaccacagttgcagccccaacctgtttgtccagaatgtcttcgtggatacccatgatcttcgcttcccctgggtggccttctttgccagcaaaagaatccgggctgggacagaacttacttgggactacaactacgaggtgggcagtgtggaaggcaaggagctactctgttgctgtggggccattgaatgcagaggacgtcttctttag

SEQ ID NO: 178 - DNA, 3915 bp, Homo sapiens
atggcgaagatcgccaagactcacgaagatattgaagcacagattcgagaaattcaaggcaagaaggcagctcttgatgaagctcaaggagtgggcctcgattctacaggttattatgaccaggaaatttatggtggaagtgacagcagatttgctggatacgtgacatcaattgctgcaactgaacttgaagatgatgacgatgactattcatcatctacgagtttgcttggtcagaagaagccaggatatcatgcccctgtggcattgcttaatgatataccacagtcaacagaacagtatgatccatttgctgagcacagacctccaaagattgcagaccgggaagatgaatacaaaaagcataggcggaccatgataatttccccagagcgtcttgatccttttgcagatggagggaaaacccctgatcctaaaatgaatgctaggacttacatggatgtaatgcgagaacaacacttgactaaagaagaacgagaaattaggcaacagctagcagaaaaagctaaagctggagaactaaaagtcgtcaatggagcagcagcgtcccagcctccatcaaaacgaaaacggcgttgggatcaaacagctgatcagactcctggtgccactcccaaaaaactatcaagttgggatcaggcagagacccctgggcatactccttccttaagatgggatgagacaccaggtcgtgcaaagggaagcgagactcctggagcaaccccaggctcaaaaatatgggatcctacacctagccacacaccagcgggagctgctactcctggacgaggtgatacaccaggccatgcgacaccaggccatggaggcgcaacttccagtgctcgtaaaaacagatgggatgaaacccccaaaacagagagagatactcctgggcatggaagtggatgggctgagactcctcgaacagatcgaggtggagattctattggtgaaacaccgactcctggagccagtaaaagaaaatcacggtgggatgaaacaccagctagtcagatgggtggaagcactccagttctgacccctggaaagacaccaattggcacaccagccatgaacatggctacccctactccaggtcacataatgagtatgactcctgaacagcttcaggcttggcggtgggaaagagaaattgatgagagaaatcgcccactttctgatgaggaattagatgctatgttcccagaaggatataaggtacttcctcctccagctggttatgttcctattcgaactccagctcgaaagctgacagctactccaacacctttgggtggtatgactggtttccacatgcaaactgaagatcgaactatgaaaagtgttaatgaccagccatctggaaatcttccatttttaaaacctgatgatattcaatactttgataaactattggttgatgttgatgaatcaacacttagtccagaagagcaaaaagagagaaaaataatgaagttgcttttaaaaattaagaatggaacaccaccaatgagaaaggctgcattgcgtcagattactgataaagctcgtgaatttggagctggtcctttgtttaatcagattcttcctctgctgatgtctcctacacttgaggatcaagagcgtcatttacttgtgaaagttattgataggatactgtacaaacttgatgacttagttcgtccatatgtgcataagatcctcgtggtcattgaaccgctattgattgatgaagattactatgctagagtggaaggccgagagatcatttctaatttggcaaaggctgctggtctggctactatgatctctaccatgagacctgatatagataacatggatgagtatgtccgtaacacaacagctagagcttttgctgttgtagcctctgccctgggcattccttctttattgcccttcttaaaagctgtgtgcaaaagcaagaagtcctggcaagcgagacacactggtattaagattgtacaacagatagctattcttatgggctgtgccatcttgccacatcttagaagtttagttgaaatcattgaacatggtcttgtggatgagcagcagaaagttcggaccatcagtgctttggccattgctgccttggctgaagcagcaactccttatggtatcgaatcttttgattctgtgttaaagcctttatggaagggtatccgccaacacagaggaaagggtttggctgctttcttgaaggctattgggtatcttattcctcttatggatgcagaatatgccaactactatactagagaagtgatgttaatccttattcgagaattccagtctcctgatgaggaaatgaaaaaaattgtgctgaaggtggtaaaacagtgttgtgggacagatggtgtagaagcaaactacattaaaacagagattcttcctcccttttttaaacacttctggcagcacaggatggctttggatagaagaaattaccgacagttagttgatactactgtggagttggcaaacaaagtaggtgcagcagaaattatatccaggattgtggatgatctgaaagatgaagccgaacagtacagaaaaatggtgatggagacaattgagaaaattatgggtaatttgggagcagcagatattgatcataaacttgaagaacaactgattgatggtattctttatgctttccaagaacagactacagaggactcagtaatgttgaacggctttggcacagtggttaatgctcttggcaaacgagtcaaaccatacttgcctcagatctgtggtacagttttgtggcgtttaaataacaaatctgctaaagttaggcaacaggcagctgacttgatttctcgaactgctgttgtcatgaagacttgtcaagaggaaaaattgatgggacacttgggtgttgtattgtatgagtatttgggtgaagagtaccctgaagtattgggcagcattcttggagcactgaaggccattgtaaatgtcataggtatgcataagatgactccaccaattaaagatctgctgcctagactcacccccatcttaaagaacagacatgaaaaagtacaagagaattgtattgatcttgttggtcgtattgctgacaggggagctgaatatgtatctgcaagagagtggatgaggatttgctttgagcttttagagctcttaaaagcccacaaaaaggctattcgtagagccacagtcaacacatttggttatattgcaaaggccattggccctcatgatgtattggctacacttctgaacaacctcaaagttcaagaaaggcagaacagagtttgtaccactgtagcaatagctattgttgcagaaacatgttcaccctttacagtactccctgccttaatgaatgaatacagagttcctgaactgaatgttcaaaatggagtgttaaaatcgctttccttcttgtttgaatatattggtgaaatgggaaaagactacatttatgccgtaacaccgttacttgaagatgctttaatggatagagaccttgtacacagacagacggctagtgcagtggtacagcacatgtcacttggggtttatggatttggttgtgaagattcgctgaatcacttgttgaactatgtatggcccaatgtatttgagacatctcctcatgtaattcaggcagttatgggagccctagagggcctgagagttgctattggaccatgtagaatgttgcaatattgtttacagggtctgtttcacccagcccggaaagtcagagatgtatattggaaaatttacaactccatctacattggttcccaggacgctctcatagcacattacccaagaatctacaacgatgataagaacacctatattcgttatgaacttgactatatcttataa

SEQ ID NO: 179 - DNA, 1581 bp, Homo sapiens
atggtaaacaaagacatgaatggattcccagtcaagaaatgctcagccttccaattttttaagaagcgggtacgaaggtggatcaagagcccaatggtcagtgtggacaagcatcagagtcccagcctgaagtacaccggctcctccatggtgcacatccctccaggggagccagacttcgagtcttccttgtgtcaaacatgcctgggtgaacatgctttccaaagaggggttctccctcaggagaacgagtcatgttcatgggaaactcaatctgggtgtgaagtgagagagccatgtaatcatgccaacatcctgaccaagcccgatccaagaaccttctggactaatgatgatccagctttcatgaagcagaggaggatgggtctgaacgactttattcagaagattgccaataactcctatgcatgcaaacaccctgaagttcagtccatcttgaagatctcccaacctcaggagcctgagcttatgaatgccaacccttctcctccaccaagtccttctcagcaaatcaaccttggcccgtcgtccaatcctcatgctaaaccatctgactttcacttcttgaaagtgatcggaaagggcagttttggaaaggttcttctagcaagacacaaggcagaagaagtgttctatgcagtcaaagttttacagaagaaagcaatcctgaaaaagaaagaggagaagcatattatgtcggagcggaatgttctgttgaagaatgtgaagcaccctttcctggtgggccttcacttctctttccagactgctgacaaattgtactttgtcctagactacattaatggtggagagttgttctaccatctccagagggaacgctgcttcctggaaccacgggctcgtttctatgctgctgaaatagccagtgccttgggctacctgcattcactgaacatcgtttatagagacttaaaaccagagaatattttgctagattcacagggacacattgtccttactgacttcggactctgcaaggagaacattgaacacaacagcacaacatccaccttctgtggcacgccggagtatctcgcacctgaggtgcttcataagcagccttatgacaggactgtggactggtggtgcctgggagctgtcttgtatgagatgctgtatggcctgccgcctttttatagccgaaacacagctgaaatgtacgacaacattctgaacaagcctctccagctgaaaccaaatattacaaattccgcaagacacctcctggagggcctcctgcagaaggacaggacaaagcggctcggggccaaggatgacttcatggagattaagagtcatgtcttcttctccttaattaactgggatgatctcattaataagaagattactcccccttttaacccaaatgtgagtgggcccaacgacctacggcactttgaccccgagtttaccgaagagcctgtccccaactccattggcaagtcccctgacagcgtcctcgtcacagccagcgtcaaggaagctgccgaggctttcctaggcttttcctatgcgcctcccacggactctttcctctga

SEQ ID NO: 180 - DNA, 945 bp, Homo sapiens
atgaagatgagctttgcgttgactttcaggtcagcaaaaggccgttggatcgcaaaccccagccagccgtgctcgaaagcctccattgggttatttgtgccagcaagtcctcctctggaccctgagaaggtcaaagagttacagcgcttcatcaccctttccaagagactccttgtgatgactggggcaggaatctccaccgaatcggggataccagactacaggtcagaaaaagtggggctttatgcccgcactgaccgcaggcccatccagcatggtgattttgtccggagtgccccaatccgccagcggtactgggcgagaaacttcgtaggctggcctcaattctcctcccaccagcctaaccctgcacactgggctttgagcacctgggagaaactcggaaagctgtactggttggtgacccaaaatgtggatgctttgcacaccaaggcggggagtcggcgcctgacagagctccacggatgcatggacagggtcctgtgcttggattgtggggaacagactccccggggggtgctgcaagagcgtttccaagtcctgaaccccacctggagtgctgaggcccatggcctggctcctgatggtgacgtctttctctcagaggagcaagtccggagctttcaggtcccaacctgcgttcaatgtggaggccatctgaaaccagatgtcgttttcttcggggacacagtgaaccctgacaaggttgattttgtgcacaagcgtgtaaaagaagccgactccctcttggtggtgggatcatccttgcaggtatactctggttacaggtttatcctcactgcctgggagaagaagctcccgattgcaatactgaacattgggcccacacggtcggatgacttggcgtgtctgaaactgaattctcgttgtggagagttgctgcctttgatagacccatgctga

SEQ ID NO: 181 - DNA, 1629 bp, Homo sapiens
atgactaaaagcaatggagaagagcccaagatggggggcaggatggagagattccagcagggagtccgtaaacgcacacttttggccaagaagaaagtgcagaacattacaaaggaggatgttaaaagttacctgtttcggaatgcttttgtgctgctcacagtcaccgctgtcattgtgggtacaatccttggatttaccctccgaccatacagaatgagctaccgggaagtcaagtacttctcctttcctggggaacttctgatgaggatgttacagatgctggtcttaccacttatcatctccagtcttgtcacaggaatggcggcgctagatagtaaggcatcagggaagatgggaatgcgagctgtagtctattatatgactaccaccatcattgctgtggtgattggcataatcattgtcatcatcatccatcctgggaagggcacaaaggaaaacatgcacagagaaggcaaaattgtacgagtgacagctgcagatgccttcctggacttgatcaggaacatgttccctccaaatctggtagaagcctgctttaaacagtttaaaaccaactatgagaagagaagctttaaagtgcccatccaggccaacgaaacgcttgtgggtgctgtgataaacaatgtgtctgaggccatggagactcttacccgaatcacagaggagctggtcccagttccaggatctgtgaatggagtcaatgccctgggtctagttgtcttctccatgtgcttcggttttgtgattggaaacatgaaggaacaggggcaggccctgagagagttctttgattctcttaacgaagccatcatgagactggtagcagtaataatgtggtatgcccccgtgggtattctcttcctgattgctgggaagattgtggagatggaagacatgggtgtgattggggggcagcttgccatgtacaccgtgactgtcattgttggcttactcattcacgcagtcatcgtcttgccactcctctacttcttggtaacacggaaaaacccttgggtttttattggagggttgctgcaagcactcatcaccgctctggggacctcttcaagttctgccaccctacccatcaccttcaagtgcctggaagagaacaatggcgtggacaagcgcgtcaccagattcgtgctccccgtaggagccaccattaacatggatgggactgccctctatgaggctttggctgccattttcattgctcaagttaacaactttgaactgaacttcggacaaattattacaatcagcatcacagccacagctgccagtattggggcagctggaattcctcaggcgggcctggtcactatggtcattgtgctgacatctgtcggcctgcccactgacgacatcacgctcatcatcgcggtggactggttcctggatcgcctccggaccaccaccaacgtactgggagactccctgggagctgggattgtggagcacttgtcacgacatgaactgaagaacagagatgttgaaatgggtaactcagtgattgaagagaatgaaatgaagaaaccatatcaactgattgcacaggacaatgaaactgagaaacccatcgacagtgaaaccaagatgtag

SEQ ID NO: 182 - DNA, 2295 bp, Homo sapiens
atgattgaaccctttgggaatcagtatattgtggccaggccagtgtattctacaaatgcttttgaggaaaatcataaaaagacaggaagacatcataagacatttctggatcatctcaaagtgtgttgtagctgttccccacaaaaggccaagagaattgtcctctctttgttccccatagcatcttggttgccagcataccggcttaaagaatggttgctcagtgatattgtttctggtatcagcacagggattgtggccgtactacaaggtttagcatttgctctgctggtcgacattcccccagtctatgggttgtatgcatcctttttcccagccataatctaccttttcttcggcacttccagacacatatccgtgggtccgtttccgattctgagtatgatggtgggactagcagtttcaggagcagtttcaaaagcagtcccagatcgcaatgcaactactttgggattgcctaacaactcgaataattcttcactactggatgacgagagggtgagggtggcggcggcggcatcagtcacagtgctttctggaatcatccagttggcttttgggattctgcggattggatttgtagtgatatacctgtctgagtccctcatcagtggcttcactactgctgctgctgttcatgttttggtttcccaactcaaattcatttttcagttgacagtcccgtcacacactgatccagtttcaattttcaaagtactatactctgtattctcacaaatagagaagactaatattgcagacctggtgacagctctgattgtccttttggttgtatccattgttaaagaaataaatcagcgcttcaaagacaaacttccagtgcccattccaatcgaattcattatgaccgtgattgcagcaggtgtatcctacggctgtgactttaaaaacaggtttaaagtggctgtggttggggacatgaatcctggatttcagccccctattacacctgacgtggagactttccaaaacaccgtaggagattgcttcggcatcgcaatggttgcatttgcagtggccttttcagttgccagcgtctattccctcaaatacgattatccacttgatggcaatcaggagttaatagccttgggactgggtaacatagtctgtggagtattcagaggatttgctgggagtactgccctctccagatcagcagttcaggagagcacaggaggcaaaacacagattgctgggcttattggtgccatcatcgtgctgattgtcgttctagccattggatttctcctggcgcctctacaaaagtccgtcctggcagctttagcattgggaaacttaaagggaatgctgatgcagtttgctgaaataggcagattgtggcgaaaggacaaatatgattgtttaatttggatcatgaccttcatcttcaccattgtcctgggactcgggttaggcctggcagctagtgtggcatttcaactgctaaccatcgtgttcaggacccaatttccaaaatgcagcacgctggctaatattggaagaaccaacatctataagaataaaaaagattattatgatatgtatgagccagaaggagtgaaaattttcagatgtccatctcctatctactttgcaaacattggtttctttaggcggaaacttatcgatgctgttggctttagtccacttcgaattctacgcaagcgcaacaaagctttgaggaaaatccgaaaactgcagaagcaaggcttgctacaagtgacaccaaaaggatttatatgtactgttgacaccataaaagattctgacgaagagctggacaacaatcagatagaagtactggaccagccaatcaataccacagacctgcctttccacattgactggaatgatgatcttcctctcaacattgaggtccccaaaatcagcctccacagcctcattcttgacttttcagcagtgtcctttcttgatgtttcttcagtgaggggccttaaatcgattttgcaagaatttatcaggatcaaggtagatgtgtatatcgttggaactgatgatgacttcattgagaagcttaaccggtatgaattttttgatggtgaagtgaaaagctcaatatttttcttaacaatccatgatgctgttttgcatattttgatgaagaaagattacagtacttcaaagtttaatcccagtcaggaaaaagatggaaaaattgattttaccataaatacaaatggaggattacgtaatcgggtatatgaggtgccagttgaaacaaaattctaa

SEQ ID NO: 183 - DNA, 1962 bp, Homo sapiens
atgcactgcctgggcgccgagtacctggtttctgcagaaggagcccctaggcaaagggagtggcgaccccagatttataggaaatgcacagatacggcatggttattcctgttctttctcttttggactggtttggtgtttatcatgggctactcggtggtggctggagccgcgggaagactcctctttggctatgacagctttggcaacatgtgtggcaagaagaactcccccgtggaaggggcccctctttcagggcaggacatgaccctaaaaaaacacgtgttctttatgaattcctgcaacctggaagtcaaaggtacgcagctcaaccgcatggccctctgtgtatccaactgccctgaagagcagcttgactccctggaagaggtccagttctttgcaaacaccagtgggtccttcctgtgtgtttatagtttgaattccttcaactatacccacagtccaaaagcagactcactgtgtcccaggctaccagttcctccaagcaagtcatttcccttatttaaccgatgtgtccctcaaacacctgagtgctactccctatttgcatctgttttgataaatgatgttgacaccctccaccgaattctaagtggaatcatgtcgggaagagatacaatccttggcctgtgtatcctcgcattagccttgtctttggccatgatgtttaccttcagattcatcaccacccttctggttcacattttcatttcattggttattttgggattgttgtttgtctgcggtgttttatggtggctgtattatgactataccaacgacctcagcatagaattggacacagaaagggaaaatatgaagtgcgtgctggggtttgctatcgtatccacaggcatcacggcagtgctgctcgtcttgatttttgttctcagaaagagaataaaattgacagttgagcttttccaaatcacaaataaagccatcagcagtgctcccttcctgctgttccagccactgtggacatttgccatcctcattttcttctgggtcctctgggtggctgtgctgctgagcctgggaactgcaggagctgcccaggttatggaaggcggccaagtggaatataagcccctttcgggcattcggtacatgtggtcgtaccatttaattggcctcatctggactagtgaattcatccttgcgtgccagcaaatgactatagctggggcagtggttacttgttatttcaacagaagtaaaaatgatcctcctgatcatcccatcctttcgtctctctccattctcttcttctaccatcaaggaaccgttgtgaaagggtcatttttaatctctgtggtgaggattccgagaatcattgtcatgtacatgcaaaacgcactgaaagaacagcagcatggtgcattgtccaggtacctgttccgatgctgctactgctgtttctggtgtcttgacaaatacctgctccatctcaaccagaatgcatatactacaactgctattaatgggacagatttctgtacatcagcaaaagatgcattcaaaatcttgtccaagaactcaagtcactttacatctattaactgctttggagacttcataatttttctaggaaaggtgttagtggtgtgtttcactgtttttggaggactcatggcttttaactacaatcgggcattccaggtgtgggcagtccctctgttattggtagctttttttgcctacttagtagcccatagttttttatctgtgtttgaaactgtgctggatgcacttttcctgtgttttgctgttgatctggaaacaaatgatggatcgtcagaaaagccctactttatggatcaagaatttctgagtttcgtaaaaaggagcaacaaattaaacaatgcaagggcacagcaggacaagcactcattaaggaatgaggagggaacagaactccaggccattgtgagatag

SEQ ID NO: 184 - DNA, 3366 bp, Homo sapiens
atgaaggtgaaggaggagaaggctggggtaggaaagctggaccacactaaccacaggaggagatttccggatcagaaagaatgccctcctatccacattgggcttccagtacccacttaccctcaaagaaaaactgaccagaagggacatctttcaggcctgcaaaaagtccactggggcctgcggccagaccagccacagcaggaactgactggcccagggagtggggcaagcagccaggacagcagcatggatcttatcagcaggactcggtccccagctgctgagcagctccaggacatcctgggggaggaagatgaggctcccaaccccaccctctttacagagatggatactctgcagcatgacggagaccagatggagtggaaggagtcagccaggtggataaagtttgaagaaaaggtagaggaaggcggcgaacgctggagcaagccccacgtgtccacactatccctgcacagcctcttcgagctccgtacctgcctgcagacggggacggtgctgctggatttggacagtggctccttaccacagatcatagatgatgtcattgagaagcagattgaggatggtctcctgcggccagagctccgggagagggtcagttacgtcctcctgaggaggcaccgccaccaaaccaagaagcccatccaccgctccttagctgacattgggaagtcagtctccaccacaaatcgcagtcctgcccggagccctggtgctggcccgagtctacaccactccacggaagacctgcggatgcggcagagtgcaaattacggacgtctgtgtcatgcccagagcagaagcatgaatgacatttctctcaccccaaacacagaccagcggaaaaacaaattcatgaagaagatccccaaggactcagaagcgtccaacgtgctcgtgggcgaggtggacttcctagaccagccattcatcgcgttcgtgcgcctcatccagtcggccatgctgggaggagtgaccgaggtgcctgtccccaccagatttctgtttatactactgggaccttctgggagagcaaaatcctacaatgaaattggccgtgccattgcaaccctcatggtagatgatctcttcagtgacgtggcctacaaagcccgcaatcgggaagatctgatcgcaggaattgatgaatttctggatgaggtcatcgtccttcctcctggagaatgggacccaaatatccggattgagccccccaagaaggtgccctctgctgacaagaggaaatctgtgttctccctagcagagctgggccagatgaatggctctgtgggaggaggcggcggagctcctggaggaggcaatggaggtggtggtggtggtggcagtggcggcggggctggcagtggcggggccggcggaacaagcagcggggatgatggagagatgccagccatgcatgaaatcggggaggaacttatctggacaggaaggttcttcggtggcctgtgtctggatatcaagaggaagttgccctggttcccaagtgacttctatgatggcttccacattcagtccatctctgccatcctattcatctacctcggctgtatcaccaacgcgatcacctttggtgggcttctgggggatgccaccgacaattatcagggagtgatggagagcttcctgggcactgccatggctggctccttgttctgcctcttctcgggacagcctctcatcattctcagcagcacggggcccatcctcatctttgagaagctcctcttcgacttcagcaaaggcaatggcctggactacatggagttccgcctctggattggcctacactcagctgtccagtgccttatcctagtggccacagatgccagctttatcatcaaatatatcacccgcttcaccgaggagggcttctccacccttatcagcttcatcttcatctacgatgccatcaagaagatgatcggtgccttcaagtactaccctatcaatatggacttcaagccaaacttcatcactacctacaagtgcgagtgtgtcgcccctgacacagtgaatacaaccgtgttcaatgcttcagccccattggcaccagacaccaacgcttctctgtacaacctccttaacctcacagcgttggactggtccctgctgagcaagaaggagtgtctgagctacggcgggcgcctgcttgggaattcctgcaagtttatcccagacctggcgctcatgtccttcatccttttctttgggacatactccatgaccctgaccctgaagaagttcaaattcagccgctattttcctaccaaggtccgggccctggtggctgacttttccattgttttctccatcctgatgttctgtggaatcgatgcctgttttggcctagaaactcccaagctgcatgtgcccagtgtcatcaagccaacgcggcctgaccgaggctggttcgtggccccctttgggaagaacccgtggtgggtatacccagcaagcatcctgcccgccctgctggtgaccatcctgatcttcatggaccagcagatcactgccgtcattgtcaaccggaaggagaacaaactgaagaaggctgccggctaccatctggacctgttctgggtgggcatcctcatggctttgtgctcctttatggggctcccctggtacgtggctgccacggtcatctccatcgcccacatcgacagcctcaagatggagacagagaccagtgcccctggggagcagccccagtttctgggagtcagggaacagagagtaaccggcatcatcgtcttcatcctgacgggaatctctgtcttcctggctcccatcctaaagtgtatccccctgccggtgctgtacggagtcttcctctacatgggcgtggcctccctgaatggcatccagttctgggaacgctgcaagctcttcctgatgccagccaagcaccagccggaccatgccttcctgcggcacgtgccgctgcgccggatccacctcttcaccctggtgcagatcctctgcctggcggtgctctggatcctcaaatccacggtggctgccatcatcttcccggtcatgatcctgggcctcatcatcgttcgaaggcttctggatttcatcttttcccagcacgacctggcctggattgacaacatcctcccagagaaggaaaaaaaggagacagacaagaagaggaagagaaaaaaaggggcccacgaggactgtgatgaggagccccagttccctcctccctcggttataaagattcccatggaaagtgtccaatcagatccccaaaacggtatccactgcattgccagaaaaagatcttccagttggagttactcactctga

SEQ ID NO: 185 - DNA, 1404 bp, Homo sapiens
atgtcgtccatcttgccattcacgccgccagttgtgaagagactgctgggatggaagaagtcagctggtgggtctggaggagcaggcggaggagagcagaatgggcaggaagaaaagtggtgtgagaaagcagtgaaaagtctggtgaagaagctaaagaaaacaggacgattagatgagcttgagaaagccatcaccactcaaaactgtaatactaaatgtgttaccataccaagcacttgctctgaaatttggggactgagtacaccaaatacgatagatcagtgggatacaacaggcctttacagcttctctgaacaaaccaggtctcttgatggtcgtctccaggtatcccatcgaaaaggattgccacatgttatatattgccgattatggcgctggcctgatcttcacagtcatcatgaactcaaggcaattgaaaactgcgaatatgcttttaatcttaaaaaggatgaagtatgtgtaaacccttaccactatcagagagttgagacaccagttttgcctccagtattagtgccccgacacaccgagatcctaacagaacttccgcctctggatgactatactcactccattccagaaaacactaacttcccagcaggaattgagccacagagtaattatattccagaaacgccacctcctggatatatcagtgaagatggagaaacaagtgaccaacagttgaatcaaagtatggacacaggctctccagcagaactatctcctactactctttcccctgttaatcatagcttggatttacagccagttacttactcagaacctgcattttggtgttcgatagcatattatgaattaaatcagagggttggagaaaccttccatgcatcacagccctcactcactgtagatggctttacagacccatcaaattcagagaggttctgcttaggtttactctccaatgttaaccgaaatgccacggtagaaatgacaagaaggcatataggaagaggagtgcgcttatactacataggtggggaagtttttgctgagtgcctaagtgatagtgcaatctttgtgcagagccccaattgtaatcagagatatggctggcaccctgcaacagtgtgtaaaattccaccaggctgtaatctgaagatcttcaacaaccaggaatttgctgctcttctggctcagtctgttaatcagggttttgaagccgtctatcagctaactagaatgtgcaccataagaatgagttttgtgaaagggtggggagcagaataccgaaggcagacggtaacaagtactccttgctggattgaacttcatctgaatggacctctacagtggttggacaaagtattaactcagatgggatccccttcagtgcgttgctcaagcatgtcataa

SEQ ID NO: 186 - DNA, 1659 bp, Homo sapiens
atggacaatatgtctattacgaatacaccaacaagtaatgatgcctgtctgagcattgtgcatagtttgatgtgccatagacaaggtggagagagtgaaacatttgcaaaaagagcaattgaaagtttggtaaagaagctgaaggagaaaaaagatgaattggattctttaataacagctataactacaaatggagctcatcctagtaaatgtgttaccatacagagaacattggatgggaggcttcaggtggctggtcggaaaggatttcctcatgtgatctatgcccgtctctggaggtggcctgatcttcacaaaaatgaactaaaacatgttaaatattgtcagtatgcgtttgacttaaaatgtgatagtgtctgtgtgaatccatatcactacgaacgagttgtatcacctggaattgatctctcaggattaacactgcagagtaatgctccatcaagtatgatggtgaaggatgaatatgtgcatgactttgagggacagccatcgttgtccactgaaggacattcaattcaaaccatccagcatccaccaagtaatcgtgcatcgacagagacatacagcaccccagctctgttagccccatctgagtctaatgctaccagcactgccaactttcccaacattcctgtggcttccacaagtcagcctgccagtatactggggggcagccatagtgaaggactgttgcagatagcatcagggcctcagccaggacagcagcagaatggatttactggtcagccagctacttaccatcataacagcactaccacctggactggaagtaggactgcaccatacacacctaatttgcctcaccaccaaaacggccatcttcagcaccacccgcctatgccgccccatcccggacattactggcctgttcacaatgagcttgcattccagcctcccatttccaatcatcctgctcctgagtattggtgttccattgcttactttgaaatggatgttcaggtaggagagacatttaaggttccttcaagctgccctattgttactgttgatggatacgtggacccttctggaggagatcgcttttgtttgggtcaactctccaatgtccacaggacagaagccattgagagagcaaggttgcacataggcaaaggtgtgcagttggaatgtaaaggtgaaggtgatgtttgggtcaggtgccttagtgaccacgcggtctttgtacagagttactacttagacagagaagctgggcgtgcacctggagatgctgttcataagatctacccaagtgcatatataaaggtctttgatttgcgtcagtgtcatcgacagatgcagcagcaggcggctactgcacaagctgcagcagctgcccaggcagcagccgtggcaggaaacatccctggcccaggatcagtaggtggaatagctccagctatcagtctgtcagctgctgctggaattggtgttgatgaccttcgtcgcttatgcatactcaggatgagttttgtgaaaggctggggaccggattacccaagacagagcatcaaagaaacaccttgctggattgaaattcacttacaccgggccctccagctcctagacgaagtacttcataccatgccgattgcagacccacaacctttagactga

SEQ ID NO: 187 - DNA, 4944 bp, Homo sapiens
atgtccactccagacccacccctgggcggaactcctcggccaggtccttccccgggccctggcccttcccctggagccatgctgggccctagcccgggtccctcgccgggctccgcccacagcatgatggggcccagcccagggccgccctcagcaggacaccccatccccacccaggggcctggagggtaccctcaggacaacatgcaccagatgcacaagcccatggagtccatgcatgagaagggcatgtcggacgacccgcgctacaaccagatgaaaggaatggggatgcggtcagggggccatgctgggatggggcccccgcccagccccatggaccagcactcccaaggttacccctcgcccctgggtggctctgagcatgcctctagtccagttccagccagtggcccgtcttcggggccccagatgtcttccgggccaggaggtgccccgctggatggtgctgacccccaggccttggggcagcagaaccggggcccaaccccatttaaccagaaccagctgcaccagctcagagctcagatcatggcctacaagatgctggccagggggcagcccctccccgaccacctgcagatggcggtgcagggcaagcggccgatgcccgggatgcagcagcagatgccaacgctacctccaccctcggtgtccgcaacaggacccggccctggccctggccctggccccggcccgggtcccggcccggcacctccaaattacagcaggcctcatggtatgggagggcccaacatgcctcccccaggaccctcgggcgtgccccccgggatgccaggccagcctcctggagggcctcccaagccctggcctgaaggacccatggcgaatgctgctgcccccacgagcacccctcagaagctgattcccccgcagccaacgggccgcccttcccccgcgccccctgccgtcccacccgccgcctcgcccgtgatgccaccgcagacccagtcccccgggcagccggcccagcccgcgcccatggtgccactgcaccagaagcagagccgcatcacccccatccagaagccgcggggcctcgaccctgtggagatcctgcaggagcgcgagtacaggctgcaggctcgcatcgcacaccgaattcaggaacttgaaaaccttcccgggtccctggccggggatttgcgaaccaaagcgaccattgagctcaaggccctcaggctgctgaacttccagaggcagctgcgccaggaggtggtggtgtgcatgcggagggacacagcgctggagacagccctcaatgctaaggcctacaagcgcagcaagcgccagtccctgcgcgaggcccgcatcactgagaagctggagaagcagcagaagatcgagcaggagcgcaagcgccggcagaagcaccaggaatacctcaatagcattctccagcatgccaaggatttcaaggaatatcacagatccgtcacaggcaaaatccagaagctgaccaaggcagtggccacgtaccatgccaacacggagcgggagcagaagaaagagaacgagcggatcgagaaggagcgcatgcggaggctcatggctgaagatgaggaggggtaccgcaagctcatcgaccagaagaaggacaagcgcctggcctacctcttgcagcagacagacgagtacgtggctaacctcacggagctggtgcggcagcacaaggctgcccaggtcgccaaggagaaaaagaagaaaaagaaaaagaagaaggcagaaaatgcagaaggacagacgcctgccattgggccggatggcgagcctctggacgagaccagccagatgagcgacctcccggtgaaggtgatccacgtggagagtgggaagatcctcacaggcacagatgcccccaaagccgggcagctggaggcctggctcgagatgaacccggggtatgaagtagctccgaggtctgatagtgaagaaagtggctcagaagaagaggaagaggaggaggaggaagagcagccgcaggcagcacagcctcccaccctgcccgtggaggagaagaagaagattccagatccagacagcgatgacgtctctgaggtggacgcgcggcacatcattgagaatgccaagcaagatgtcgatgatgaatatggcgtgtcccaggcccttgcacgtggcctgcagtcctactatgccgtggcccatgctgtcactgagagagtggacaagcagtcagcgcttatggtcaatggtgtcctcaaacagtaccagatcaaaggtttggagtggctggtgtccctgtacaacaacaacctgaacggcatcctggccgacgagatgggcctggggaagaccatccagaccatcgcgctcatcacgtacctcatggagcacaaacgcatcaatgggcccttcctcatcatcgtgcctctctcaacgctgtccaactgggcgtacgagtttgacaagtgggccccctccgtggtgaaggtgtcttacaagggatccccagcagcaagacgggcctttgtcccccagctccggagtgggaagttcaacgtcttgctgacgacgtacgagtacatcatcaaagacaagcacatcctcgccaagatccgttggaagtacatgattgtggacgaaggtcaccgcatgaagaaccaccactgcaagctgacgcaggtgctcaacacgcactatgtggcaccccgccgcctgctgctgacgggcacaccgctgcagaacaagcttcccgagctctgggcgctgctcaacttcctgctgcccaccatcttcaagagctgcagcaccttcgagcagtggtttaacgcaccctttgccatgaccggggaaaaggtggacctgaatgaggaggaaaccattctcatcatccggcgtctccacaaagtgctgcggcccttcttgctccgacgactcaagaaggaagtcgaggcccagttgcccgaaaaggtggagtacgtcatcaagtgcgacatgtctgcgctgcagcgagtgctctaccgccacatgcaggccaagggcgtgctgctgactgatggctccgagaaggacaagaagggcaaaggcggcaccaagaccctgatgaacaccatcatgcagctgcggaagatctgcaaccacccctacatgttccagcacatcgaggagtccttttccgagcacttggggttcactggcggcattgtccaagggctggacctgtaccgagcctcgggtaaatttgagcttcttgatagaattcttcccaaactccgagcaaccaaccacaaagtgctgctgttctgccaaatgacctccctcatgaccatcatggaagattactttgcgtatcgcggctttaaatacctcaggcttgatggaaccacgaaggcggaggaccggggcatgctgctgaaaaccttcaacgagcccggctctgagtacttcatcttcctgctcagcacccgggctggggggctcggcctgaacctccagtcggcagacactgtgatcatttttgacagcgactggaatcctcaccaggacctgcaagcgcaggaccgagcccaccgcatcgggcagcagaacgaggtgcgtgtgctccgcctctgcaccgtcaacagcgtggaggagaagatcctagctgcagccaagtacaagctcaacgtggaccagaaggtgatccaggccggcatgttcgaccagaagtcctccagccatgagcggcgcgccttcctgcaggccatcctggagcacgaggagcaggatgagagcagacactgcagcacgggcagcggcagtgccagcttcgcccacactgcccctccgccagcgggcgtcaaccccgacttggaggagccacctctaaaggaggaagacgaggtgcccgacgacgagaccgtcaaccagatgatcgcccggcacgaggaggagtttgatctgttcatgcgcatggacctggaccgcaggcgcgaggaggcccgcaaccccaagcggaagccgcgcctcatggaggaggacgagctcccctcgtggatcatcaaggacgacgcggaggtggagcggctgacctgtgaggaggaggaggagaagatgttcggccgtggctcccgccaccgcaaggaggtggactacagcgactcactgacggagaagcagtggctcaaggccatcgaggagggcacgctggaggagatcgaagaggaggtccggcagaagaaatcatcacggaagcgcaagcgagacagcgacgccggctcctccaccccgaccaccagcacccgcagccgcgacaaggacgacgagagcaagaagcagaagaagcgcgggcggccgcctgccgagaaactctcccctaacccacccaacctcaccaagaagatgaagaagattgtggatgccgtgatcaagtacaaggacagcagcagtggacgtcagctcagcgaggtcttcatccagctgccctcgcgaaaggagctgcccgagtactacgagctcatccgcaagcccgtggacttcaagaagataaaggagcgcattcgcaaccacaagtaccgcagcctcaacgacctagagaaggacgtcatgctcctgtgccagaacgcacagaccttcaacctggagggctccctgatctatgaagactccatcgtcttgcagtcggtcttcaccagcgtgcggcagaaaatcgagaaggaggatgacagtgaaggcgaggagagtgaggaggaggaagagggcgaggaggaaggctccgaatccgaatctcggtccgtcaaagtgaagatcaagcttggccggaaggagaaggcacaggaccggctgaagggcggccggcggcggccgagccgagggtcccgagccaagccggtcgtgagtgacgatgacagtgaggaggaacaagaggaggaccgctcaggaagtggcagcgaagaagactga

SEQ ID NO: 188 - DNA, 1158 bp, Homo sapiens
atgatgatgatggcgctgagcaagaccttcgggcagaagcccgtgaagttccagctggaggacgacggcgagttctacatgatcggctccgaggtgggaaactacctccgtatgttccgaggttctctgtacaagagatacccctcactctggaggcgactagccactgtggaagagaggaagaaaatagttgcatcgtcacatggtaaaaaaacaaaacctaacactaaggatcacggatacacgactctagccaccagtgtgaccctgttaaaagcctcggaagtggaagagattctggatggcaacgatgagaagtacaaggctgtgtccatcagcacagagccccccacctacctcagggaacagaaggccaagaggaacagccagtgggtacccaccctgcccaacagctcccaccacttagatgccgtgccatgctccacaaccatcaacaggaaccgcatgggccgagacaagaagagaaccttccccctttgctttgatgaccatgacccagctgtgatccatgagaacgcatctcagcccgaggtgctggtccccatccggctggacatggagatcgatgggcagaagctgcgagacgccttcacctggaacatgaatgagaagttgatgacgcctgagatgttttcagaaatcctctgtgacgatctggatttgaacccgctgacgtttgtgccagccatcgcctctgccatcagacagcagatcgagtcctaccccacggacagcatcctggaggaccagtcagaccagcgcgtcatcatcaagctgaacatccatgtgggaaacatttccctggtggaccagtttgagtgggacatgtcagagaaggagaactcaccagagaagtttgccctgaagctgtgctcggagctggggttgggcggggagtttgtcaccaccatcgcatacagcatccggggacagctgagctggcatcagaagacctacgccttcagcgagaaccctctgcccacagtggagattgccatccggaacacgggcgatgcggaccagtggtgcccactgctggagactctgacagacgctgagatggagaagaagatccgcgaccaggacaggaacacgaggcggatgaggcgtcttgccaacacggccccggcctggtaa

SEQ ID NO: 189 - DNA, 3636 bp, Homo sapiens
atgcttgaggtgtcgatccccaccccccaccgctatgtcagaggtaagtcaaatctcatggatgccatcagctttgtgctaggtgaaaaaaccagcaacctgcgggtaaagaccctgcgggacctgatccatggagctcctgtgggcaagccagctgccaaccgggcctttgtcagcatggtctactctgaggagggtgctgaggaccgtacctttgcccgtgtcattgtaggaggttcttctgagtacaagatcaacaacaaagtggtccaactacatgagtacagtgaggaattagagaagttgggcattctcatcaaagctcgtaacttcctcgttttccagggtgctgtggaatctattgccatgaagaaccccaaagagaggacagctctatttgaagagattagtcgttctggggagctggcgcaggagtatgacaagcgaaagaaggaaatggtgaaggctgaagaggacacacagtttaattaccatcgcaagaaaaatattgcggctgaacgcaaggaagcaaagcaggagaaagaagaggctgaccggtaccagcgcctgaaggatgaggtagtacgggctcaggtacagctgcagctctttaagctttaccataatgaagtggaaattgagaagctcaacaaggaactggcctcaaagaacaaggagatcgagaaggacaagaagcgtatggacaaggtggaggatgaactgaaggagaagaagaaggagctgggcaaaatgatgcgggagcagcagcagattgagaaggagatcaaggagaaggactcagaattgaaccagaagcggcctcagtacatcaaagccaaggagaacacctcccacaaaatcaagaagctggaagcagccaagaagtctctgcagaatgctcagaagcactacaagaagcgtaaaggtgacatggatgagctggagaaggagatgctgtcagtggagaaggctcggcaggagtttgaagaacggatggaagaagagagtcagagtcagggcagagatttgacgttggaggagaatcaggtgaagaaataccaccggttgaaagaagaagccagcaagagagcagctaccctggcccaggagctggagaaattcaatcgagaccagaaagctgaccaggaccgtctggatctggaagaacggaagaaagtagagacagaggccaagatcaagcaaaagctgcgggaaattgaagagaatcagaagcggattgagaaactggaggaatacatcaccactagcaagcagtccctagaagagcagaagaagctagagggggagctgacagaggaggtggagatggccaagcggcgtattgatgaaatcaataaggagctgaaccaggtgatggagcagctaggggatgcccgcatcgaccgccaggagagcagccgccagcagcgaaaggcagagataatggaaagcatcaagcgcctttaccctggctctgtgtacggccgcctcattgacctatgccagcccacacaaaagaagtatcagattgctgtaaccaaggttttgggcaagaacatggatgccattattgtggactcggagaagacaggccgggactgtattcagtatatcaaggagcagcgtggggagcctgagaccttcttgcctcttgactacctggaggtgaagcctacagatgagaaactccgggagctgaagggggccaagctagtgattgatgtgattcgctatgagccacctcatatcaaaaaggccctgcagtatgcttgtggcaatgcccttgtctgtgacaacgtggaagatgcccgccgcattgcctttggaggccaccagcgccacaagacagtggcactggatggaaccctattccagaagtcaggagtgatctctggtggggccagtgacctgaaggccaaggcacggcgctgggatgagaaagcagtagacaagttgaaagagaagaaggagcgcttgacagaggagctgaaagagcagatgaaggcaaaacggaaagaggcagagctgcgtcaggtgcagtctcaggcccatggactgcagatgcggctcaagtactcccagagtgacctagaacagaccaagacacgacatctagccctgaatctgcaggaaaaatccaagctggagagtgagctagccaactttgggcctcgcattaatgatatcaagaggatcattcagagccgagagagggaaatgaaagacttgaaggagaagatgaaccaggtagaggatgaggtgtttgaagagttttgtcgggagattggtgtgcgcaacatccgggagtttgaggaagaaaaggtgaaacggcagaatgaaatcgccaagaagcgtttggagtttgagaatcagaagactcgcttgggcattcagttggattttgaaaagaaccaactgaaggaggaccaagataaagtacacatgtgggagcagacagtgaaaaaagatgaaaatgagatagaaaagctcaaaaaggaggaacaaagacacatgaagatcatagatgagaccatggctcagctacaagacctgaagaatcagcatctggccaagaagtcggaagtgaatgacaagaatcatgagatggaggagattcgtaagaaactcgggggcgccaacaaggaaatgacccatttacagaaggaggtgacagccattgagaccaagcttgaacagaagcgcagtgaccgtcacaacttgctacaggcctgtaagatgcaggacattaagttgccactgtcaaaaggcaccatggatgatattagtcaggaagagggtagctcccagggggaggactcagtgagtggttcacagagaatttccagtatctatgcacgagaggccctcattgagattgactacggtgatctgtgtgaggatctgaaggatgcccaggctgaggaagagatcaagcaagagatgaacacactgcagcagaagctgaatgagcagcagagtgtgcttcagcgtattgccgcccccaacatgaaggccatggaaaagctggaaagtgtccgagacaagttccaggagacctcagatgagtttgaagcagcccgaaagcgagcaaagaaggccaagcaggcattcgaacagatcaagaaggagcgctttgaccgcttcaatgcttgttttgaatctgtggctaccaacattgatgagatctataaggccctgtcccgcaatagcagtgcccaggcattcctgggccctgagaaccctgaagagccctacttggatggcatcaactacaactgtgtggctcctgggaaacgcttccggcctatggacaacttgtcaggcggggagaagacagtggcagctctggccctgctctttgccatccacagctacaagccagcccccttcttcgtcctggatgagattgatgctgccttggataacaccaacattggcaaggtggcaaattacatcaaggagcagtcgacttgcaacttccaggccatcgtcatctctctcaaggaggagttctacaccaaggccgagagcctcattggagtctatcctgagcaaggggactgtgtgatcagcaaagtcctgaccttcgacctcaccaagtacccagatgccaaccccaaccccaatgagcagtag

SEQ ID NO: 190 - DNA, 3654 bp, Homo sapiens
atgtacataaagcaggtgattatccagggttttcgaagttacagagatcaaacaattgtagatcccttcagttcaaaacataatgtgattgtgggcagaaatggatctggaaaaagtaactttttttatgcaattcagtttgttctcagtgatgagtttagtcatcttcgtccagaacagcggttggctttattgcatgaaggtactggtcctcgtgttatttctgcttttgtggagattatttttgataattcagacaaccggttaccaatcgataaagaggaagtttcacttcgaagagttattggtgccaaaaaggatcagtatttcttagacaagaagatggtcacgaaaaatgatgtgatgaacctccttgaaagcgctggtttttctcgaagcaatccttattatattgttaaacaaggaaagatcaaccagatggcaacagcaccagattctcagagattaaagctattaagagaagtagctggtactagagtgtatgacgaacgaaaggaagaaagcatctccttaatgaaagaaacagagggcaaacgggaaaaaatcaatgagttgttaaaatacattgaagagagattacatactctagaggaagaaaaggaagaactagctcagtatcagaagtgggataaaatgagacgagccctggaatataccatttacaatcaggaacttaacgagactcgtgccaaacttgatgagctttctgctaagcgagagactagtggagaaaaatccagacaattaagagatgctcagcaggatgcaagagataaaatggaggatatcgaacgccaagttagagaattgaaaacaaaaatttcagctatgaaagaagaaaaagaacagcttagtgctgaaagacaagagcagattaagcagaggactaagttggagcttaaagccaaggatttacaagatgaactagcaggcaatagtgaacaaaggaaacgtttattaaaagagaggcagaagctgcttgaaaaaatagaagaaaagcagaaagaactggcagaaacagaacccaaattcaacagtgtgaaagagaaagaagaacgaggaattgctagattggctcaagctacccaggaaagaacggatctttatgcaaagcagggtcgaggaagccagtttacatcaaaagaagaaagggataagtggattaaaaaggaactcaagtctttagatcaggctattaatgacaagaaaagacagattgctgctatacataaggatttggaagacactgaagcaaataaagagaaaaatctggagcagtataataaactggaccaggatcttaatgaagtcaaagctcgagtagaagaactggacagaaaatattacgaagtaaaaaataagaaagatgaactacaaagtgaaagaaactacttgtggagagaagagaatgcagaacagcaagcacttgctgctaaaagagaagatcttgaaaagaagcaacaacttcttagagcagcaacaggaaaggccattttaaatggaatagacagcataaacaaagtgctagaccacttccgtcgaaaaggaataaaccagcatgttcaaaatggctatcatggtattgtaatgaataactttgaatgtgaaccagctttctacacatgcgtggaagtcactgctggaaacaggttattttatcacattgttgattcagatgaagtcagcacgaagattttaatggagtttaataaaatgaatcttcctggagaggttacttttctgcctcttaacaagttagatgtcagggatacagcctatcctgaaaccaatgatgctattcctatgatcagcaaactgaggtacaatcccagatttgacaaagctttcaaacatgtgtttggaaagactcttatttgtcgtagcatggaagtttcaacccagctggcccgtgctttcactatggactgtattactttggaaggtgaccaagtcagccatcggggtgctctaactgggggttattatgacacaaggaagtctcgacttgaattgcaaaaagatgttagaaaagcagaagaagaactaggtgaacttgaagcaaagctcaatgaaaacctgcgcagaaatattgaaaggattaataatgaaattgatcagttgatgaaccaaatgcaacagatcgagacccagcaaaggaaatttaaagcatctagagatagcatattatcagaaatgaagatgctaaaagagaagaggcagcagtcagagaaaaccttcatgcctaagcaacgtagcttacagagtttggaggcaagcttgcatgctatggagtctaccagagagtcattgaaagcagaactgggaactgatttgctttctcaactgagtttggaagatcagaagagagtagatgcactgaatgatgagattcgtcaacttcagcaggaaaacagacagttgctaaatgaaagaattaaattagaaggtattattactcgagtagagacttatctcaatgagaatctgagaaaacgcttggaccaagtagaacaggaacttaatgagctgagagagacagaagggggtactgttctcacagccacaacatcagaacttgaagccatcaataaaagagtaaaagacactatggcacgatcagaagatttggacaattccattgataaaacagaagctggaattaaggagcttcagaagagtatggagcgctggaaaaatatggaaaaagaacatatggatgctataaatcatgatactaaagaactggaaaagatgacaaatcggcaaggcatgctattgaagaagaaagaagagtgtatgaagaaaattcgagaacttggatcacttccccaggaagcatttgaaaagtaccagacactgagcctcaaacagttgtttcgaaaacttgagcagtgcaacacagaattaaagaagtacagccatgttaacaaaaaggctttggatcagtttgtaaatttctccgagcagaaagaaaagttaataaagcgtcaagaagagttagataggggttacaaatcaatcatggaactgatgaatgtacttgaacttcggaaatatgaagctattcagttaactttcaaacaggtatctaagaacttcagtgaagtattccagaagttagtacctggtggcaaagctactttggtgatgaagaaaggagatgtggagggcagtcagtctcaagatgaaggagaagggagtggtgagagtgagaggggttctggctcacaaagcagtgtcccatcagttgaccagtttactggagttggaattagggtgtcatttacaggaaaacaaggtgaaatgagagaaatgcaacagctttcaggtggacagaaatccttggtagcccttgctctgatttttgccattcagaaatgtgacccggctccattttacttgtttgatgaaattgaccaggctctggatgctcagcacagaaaggctgtgtcagatatgattatggaacttgctgtacatgctcagtttattacaactacttttaggcctgaactgcttgagtcagctgacaaattctatggtgtaaagttcagaaataaggttagtcatattgatgtgatcacagcagagatggccaaagactttgtagaagatgataccacacatggttaa

SEQ ID NO: 191 - DNA, 2523 bp, Homo sapiens
atggataaagctctgaaagaagtgttcgactacagttatagagattacattctgtcctggtatggaaacctcagcagagatgagggacaactttaccatctgctcttggaagacttttgggaaattgccagacagctgcaccacagactgagtcacgtggatgtggttaaagttgtctgcaatgatgttgtgaggactttactcactcatttctgtgacctgaaagctgccaatgccagacatgaagaacagccaagaccttttgtgttgcacgcatgcttgaggaactcagatgatgaagtaagatttctacaaacgtgttctcgggttctggtgttttgtctcctcccctcaaaggatgtgcagtctctcagcttacgtataatgcttgcagaaattctcacaacaaaagtcttgaagccggtagtggagttactgagtaatccagattacattaaccaaatgctgcttgcccagctggcgtacagagagcaaatgaatgagcatcacaagagagcctacacctatgccccctcttacgaggacttcatcaagctcattaacagcaactctgatgtggagttcttgaagcaactaaggtatcaaattgtagtggaaataatccaggcgactacaattagcagctttccccaactgaagaggcacaaaggtaaagaaactgcggcaatgaaagctgatctcctgagggccaggaacatgaagaggtacatcaaccaactgactgtggcaaagaagcagtgtgagaagagaatccgaatcctgggaggccctgcctatgaccagcaagaggatggggccctggatgagggggaagggcctcaaagccagaagattcttcagtttgaagatatcttggccaatacgttctaccgagagcactttggaatgtacatggaaaggatggacaaaagagctctgattagtttttgggaatctgtggaacatttaaagaatgctaacaagaatgaaattccacaattagttggtgaaatttatcagaatttctttgtggagagcaaagaaatatctgtggaaaaatcactttacaaagaaattcagcagtgtcttgtaggaaataaaggtattgaagtattctacaaaatccaggaagatgtttatgagaccctaaaggataggtattacccttcatttattgtcagtgacctgtatgagaaattgttgataaaagaggaagaaaaacatgcctcacagatgatttccaacaaggatgagatgggcccaagagatgaggctggtgaggaagccgtggatgatggtaccaatcagatcaatgaacaagccagttttgctgtaaacaaactgcgagaactaaatgagaaacttgaatataaaaggcaagctctaaattctattcaaaatgcaccaaaacctgacaagaagattgtttccaagttgaaggatgaaataatcctaatagagaaagaacgcacagaccttcagctgcacatggcaagaacggattggtggtgtgaaaaccttggcatgtggaaagcctccatcaccagtggagaggttacagaagagaatggtgagcaattgccatgttactttgtcatggtaagcctacaagaagttggaggagttgaaactaagaactggacggtccccagaaggctcagcgagtttcagaatttacaccggaaactcagtgagtgcgtcccttctttaaaaaaagtccagttgccttctcttagcaagctgcctttcaaatctatagatcaaaagtttatggaaaagtcgaagaatcaattaaataagtttttacagaatctgctttcagatgaaagactgtgtcagagtgaagcactttatgccttcttgagcccttctcctgactacctcaaggttatcgacgtgcaggggaaaaaaaattctttttcattatcctcatttttggaaagacttcctcgcgacttcttctcccaccaggaggaggagacagaggaggacagtgacctgtcagattatggtgatgatgtggatgggaggaaagacgccttggctgaaccatgtttcatgttgattggggagatttttgaacttcgaggaatgtttaaatgggtgagaagaacattaattgccctcgttcaggtcacttttggaagaaccatcaacaaacaaatccgggacacagtcagctggattttcagtgagcaaatgttggtttactacatcaatattttccgggatgctttttggccaaatgggaagttggcaccaccgaccacaatcagaagcaaagagcaaagtcaggaaacaaaacagagagcacagcaaaagctgcttgaaaacattccagatatgcttcagagccttgttggacagcaaaatgcccgccacggtataataaaaatattcaatgcactgcaagaaacaagagccaacaagcatctgttatatgcgctgatggaactgctgctaattgaactgtgtcctgagctgagagttcatttagatcaacttaaagctggccaagtttga

SEQ ID NO: 192 - DNA, 4002 bp, Homo sapiens
atgcaggcgcagcagctgccctacgagtttttcagcgaagagaacgcgcccaagtggcggggactactggtgcctgcgctgaaaaaggtccaggggcaagttcatcctactctcgagtctaatgatgatgctcttcagtatgttgaagaattaattttgcaattattaaatatgctatgccaagctcagccccgaagtgcttcagatgtagaggaacgtgttcaaaaaagtttccctcatccaattgataaatgggcaatagctgatgcccaatcagctattgaaaagaggaagcgaagaaaccctttatctctcccagtagaaaaaattcatcctttattaaaggaggtcctaggttataaaattgaccaccaggtttctgtttacatagtagcagtcttagaatacatttctgcagacattttaaagctggttgggaattatgtaagaaatatacggcattatgaaattacaaaacaagatattaaagtggcaatgtgtgctgacaaggtattgatggatatgtttcatcaagatgtagaagatattaatatattatctttaactgacgaagagccttccacctcaggagaacaaacttactatgatttggtaaaagcatttatggcagaaattcgacaatatataagggaactaaatctaattataaaagtttttagagagccctttgtctccaattcaaaattgttttcagctaatgatgtagaaaatatatttagtcgcatagtagatatacatgaacttagtgtaaagttactgggccatatagaagatacagtagaaatgacagatgaaggcagtccccatccactagtaggaagctgctttgaagacttagcagaggaactggcatttgatccatatgaatcgtatgctcgagatattttgcgacctggttttcatgatcgtttccttagtcagttatcaaagcctggggcagcactttatttgcagtcaataggcgaaggtttcaaagaagctgttcaatatgttttacccaggctgcttctggcccctgtttaccactgtctccattactttgaacttttgaagcagttagaagaaaaaagtgaagatcaagaagacaaggaatgtttaaaacaagcaataacagctttgcttaatgttcagagtggtatggaaaaaatatgttctaaaagtcttgcaaaacgaagactgagtgaatctgcatgtcggttttatagtcagcaaatgaaggggaaacaactagcaatcaagaagatgaacgagattcagaagaatattgatggttgggagggaaaagacattggacagtgttgtaatgaatttataatggaaggaactcttacacgtgtaggagccaaacatgagagacacatatttctctttgatggcttaatgatttgctgtaaatcaaatcatgggcagccaagacttcctggtgctagcaatgcagaatatcgtcttaaagaaaagttttttatgcgaaaggtacaaattaatgataaagatgacaccaatgaatacaagcatgcttttgaaataattttaaaagatgaaaatagtgttatattttctgccaagtcagctgaagagaaaaacaattggatggcagcattgatatctttacagtaccggagtacactggaaaggatgcttgatgtaacaatgctacaggaagagaaagaggagcagatgaggctgcctagtgctgatgtttatagatttgcagagcctgactctgaagagaatattatatttgaagagaacatgcagcccaaggctggaattccaattatcaaagcaggaactgttattaaacttatagagaggcttacgtaccatatgtacgcagatcccaattttgttcggacatttcttacaacatacagatccttttgcaaacctcaagaactactgagtcttataatagaaaggtttgaaattccagagcctgagccaacagaagctgatcgcatagctatagagaatggagatcaacccttgagtgcagaactgaaaagatttagaaaagaatatatacagcctgtgcaactgcgagtattaaatgtatgtcggcactgggtagagcaccacttctatgattttgaaagagatgcatatcttttgcaacgaatggaagaatttattggaacagtaagaggtaaagcaatgaaaaaatgggttgaatccatcactaaaataatccaaaggaaaaaaattgcaagagacaatggaccaggtcataatattacatttcagagttcacctcccacagttgagtggcatataagcagacctgggcacatagagacttttgacctgctcaccttacacccaatagaaattgctcgacaactcactttacttgaatcagatctataccgagctgtacagccatcagaattagttggaagtgtgtggacaaaagaagacaaagaaattaactctcctaatcttctgaaaatgattcgacataccaccaacctcactctgtggtttgagaaatgtattgtagaaactgaaaatttagaagaaagagtagctgtggtgagtcgaattattgagattctacaagtctttcaagagttgaacaactttaatggtgtccttgaggttgtcagtgctatgaattcatcacctgtttacagactagaccacacatttgagcaaataccaagtcgccagaagaaaattttagaagaagctcatgaattgagtgaagatcactataagaaatatttggcaaaactcaggtctattaatccaccatgtgtgcctttctttggaatttatctcactaatatcttgaaaacagaagaaggcaaccctgaggtcctaaaaagacatggaaaagagcttataaactttagcaaaaggaggaaagtagcagaaataacaggagagatccagcagtaccaaaatcagccttactgtttacgagtagaatcagatatcaaaaggttctttgaaaacttgaatccgatgggaaatagcatggagaaggaatttacagattatcttttcaacaaatccctagaaatagaaccacgaaaccctaagcctctcccaagatttccaaaaaaatatagctatcccctaaaatctcctggtgttcgtccatcaaacccaagaccaggtaccatgaggcatcccacacctctgcagcaggagccaaggaaaattagttatagtaggatccctgaaagtgaaacagaaagtacagcatctgcaccaaattctccaagaacaccgttaacacctccgcctgcttctggtgcttccagtaccacagatgtttgcagtgtatttgattccgatcattcgagcccttttcactcaagcaatgataccgtctttatccaagttactctgccccatggcccaagatctgcttctgtatcatctataagtttaaccaaaggcactgatgaagtgcctgtccctcctcctgttcctccacgaagacgaccagaatctgccccagcagaatcttcaccatctaagattatgtctaagcatttggacagtcccccagccattcctcctaggcaacccacatcaaaagcctattcaccacgatattcaatatcagaccggacctctatctcagaccctcctgaaagccctcccttattaccaccacgagaacctgtgaggacacctgatgttttctcaagctcaccactacatctccaacctccccctttgggcaaaaaaagtgaccatggcaatgccttcttcccaaacagcccttccccctttacaccacctcctcctcaaacaccttctcctcacggcacaagaaggcatctgccatcaccaccattgacacaagaagtggaccttcattccattgctgggccgcctgttcctccacgacaaagcacttctcaacatatccctaaactccctccaaaaacttacaaaagggagcacacacacccatccatgcacagagatggaccaccactgttggagaatgcccattcttcctga

SEQ ID NO: 193 - DNA, 1245 bp, Homo sapiens
atgagcagcccggatgcgggatacgccagtgacgaccagagccagacccagagcgcgctgcccgcggtgatggccgggctgggcccctgcccctgggccgagtcgctgagccccatcggggacatgaaggtgaagggcgaggcgccggcgaacagcggagcaccggccggggccgcgggccgagccaagggcgagtcccgtatccggcggccgatgaacgctttcatggtgtgggctaaggacgagcgcaagcggctggcgcagcagaatccagacctgcacaacgccgagttgagcaagatgctgggcaagtcgtggaaggcgctgacgctggcggagaagcggcccttcgtggaggaggcagagcggctgcgcgtgcagcacatgcaggaccaccccaactacaagtaccggccgcggcggcgcaagcaggtgaagcggctgaagcgggtggagggcggcttcctgcacggcctggctgagccgcaggcggccgcgctgggccccgagggcggccgcgtggccatggacggcctgggcctccagttccccgagcagggcttccccgccggcccgccgctgctgcctccgcacatgggcggccactaccgcgactgccagagtctgggcgcgcctccgctcgacggctacccgttgcccacgcccgacacgtccccgctggacggcgtggaccccgacccggctttcttcgccgccccgatgcccggggactgcccggcggccggcacctacagctacgcgcaggtctcggactacgctggccccccggagcctcccgccggtcccatgcacccccgactcggcccagagcccgcgggtccctcgattccgggcctcctggcgccacccagcgcccttcacgtgtactacggcgcgatgggctcgcccggggcgggcggcgggcgcggcttccagatgcagccgcaacaccagcaccagcaccagcaccagcaccaccccccgggccccggacagccgtcgccccctccggaggcactgccctgccgggacggcacggaccccagtcagcccgccgagctcctcggggaggtggaccgcacggaatttgaacagtatctgcacttcgtgtgcaagcctgagatgggcctcccctaccaggggcatgactccggtgtgaatctccccgacagccacggggccatttcctcggtggtgtccgacgccagctccgcggtatattactgcaactatcctgacgtgtga

SEQ ID NO: 194 - DNA, 10995 bp, Homo sapiens
atggtccgggaaaccaggcatctctgggtgggcaacttacccgagaacgtgcgggaagagaagatcatcgagcatttcaaacgatatggccgcgtggaaagtgtcaaaattcttcccaagaggggatctgaaggaggagtggctgcctttgtggattttgtggacatcaaaagtgcacagaaagctcacaactcggtcaacaaaatgggtgacagagacctacgcacggattataatgaaccaggcaccatcccgagtgctgctcggggattggatgatacagtttccatagcatctcgtagtagagaggtttctgggttcagaggaggtggtggagggcctgcttatggtcccccaccgtcacttcatgcacgagaaggacgttatgagcggagacttgatggggcttcagataacagggagcgtgcttatgaacatagtgcctatggacaccatgaacgggggacgggaggatttgatcggacaagacattacgatcaggattactatagagatcctcgagagcggactttacaacatgggctctattacgcttctcggagtcgaagtccaaatcgctttgatgctcatgacccccgatatgaacctagggctcgcgagcagtttacactgcccagtgtggtacacagggatatctacagggatgatattacccgggaggtacgaggcagaaggccagagcggaattaccagcacagcaggagtcggtcaccacattcatcccagtctagaaatcagtctcctcagagactggctagccaagcatctagacccacaaggtcccctagcggcagcggctctagaagtagatcctccagtagtgattcaatcagcagcagcagtagtaccagcagtgacagcagtgattccagcagtagttcaagtgatgattctccagctcgatcagttcagtctgcagcagtccctgcacccacttcccagttgctttcatctctggaaaaagatgagccccgtaaaagttttggcatcaaggtccagaatcttccagtacgctctacagatacaagccttaaagatggccttttccatgaatttaagaaatttggaaaagtaacttcagtgcagatacatggaacttcagaagagaggtatggtctggtattctttcggcagcaagaggaccaagaaaaagccttgactgcatcaaaaggaaaacttttctttggcatgcagattgaagtaacagcatggataggtccagaaacagaaagtgaaaatgaatttcgccccttggatgaaaggatagatgaatttcaccccaaagcaacaagaactctctttattggcaaccttgaaaaaaccactacttaccatgaccttcgcaacatcttccagcgctttggagaaattgtggatattgacattaagaaagtaaatggagttcctcagtatgcgtttctgcaatactgtgatattgctagcgtttgtaaagctattaagaagatggatggggaatatcttggaaataatcgcctcaagctgggttttggaaagagcatgcctacaaactgcgtgtggctagatgggctttcttcgaatgtgtcagatcagtatttaacacgacatttctgccgatatgggcctgtggtaaaggtggtgtttgaccgcttaaaaggcatggccctggttctctacaatgaaattgaatatgcacaagcagctgtaaaagagaccaaagggaggaaaatcggtgggaataaaattaaggtggattttgcaaatcgggaaagtcagctggctttttatcactgcatggagaaatctggtcaagacatcagagacttttatgaaatgttagccgaaagaagagaggaacgaagggcatcctacgactataaccaagatcgtacatattatgagagtgttcgaactccaggcacttatcctgaggattccaggcgggactatccagctcgagggagagagttttattcagaatgggaaacttaccaaggagactactatgaatcacgatactacgatgatcctcgggaatacagggattacaggaatgatccttatgaacaagatattagggaatatagttacaggcaaagggaacgagaaagagaacgtgaaagatttgagtctgaccgggacagagaccatgagaggaggccgattgaacgaagtcaaagtcctgttcacttgcgacgtccacagagtcctggagcgtctccctctcaggcagagaggttgccgagtgattctgagaggaggctttacagccgatcctcagaccggagtggaagctgtagctcactctcccctccaagatatgagaaactggacaagtctcgtttggagcgctatacaaaaaatgaaaagacagataaagaacgaacttttgatccggagagagtggagagagagagacgcttaatacggaaggaaaaagtggaaaaggacaaaactgacaagcagaaacgcaaaggaaaggttcactcccctagttctcagtcttcagaaacggaccaagaaaatgagcgagagcaaagccctgaaaagcccaggagttgtaataaactgagcagagagaaagctgacaaagagggaatagcgaaaaaccgcctggaactcatgccttgcgtggttttgactcgagtgaaagagaaagagggaaaggtcattgaccacactcctgtggaaaagttgaaagccaagcttgataatgacactgtcaaatcttctgccctggaccagaaacttcaggtctctcagacggagcctgcaaaatctgacttgtctaaactggaatcagttagaatgaaagtaccaaaggaaaaggggctttcaagccatgttgaagtggtggagaaggaaggcaggcttaaagccaggaagcacctcaagcctgagcagcctgcagatggggtaagtgctgtggatctggagaagctggaagccaggaaaaggcgctttgcagattccaatttaaaagcagaaaagcaaaaaccagaggtcaagaaaagcagtccagagatggaggatgctcgcgtgctttcaaaaaagcagcctgacgtgtcctctagagaggtcattctgctgagggaaggagaggctgaaagaaagcctgtgaggaaagaaattcttaaaagagaatctaaaaaaatcaaactggacagacttaatactgttgccagccccaaagactgtcaggagcttgccagtatttctgttgggtctggctcaaggcccagctcagacctacaagcaagactgggagaactagcaggtgaatctgtggaaaatcaagaagtccaatcaaaaaagcccattccctcaaaaccacagctcaaacagctgcaggtattagatgatcaaggaccagagagagaagacgttaggaaaaactattgcagtcttcgtgatgaaacacctgaacgtaaatcaggccaagagaaatcacattcagtaaatactgaagaaaaaattggcattgacatcgatcacacgcagagttaccgaaaacaaatggaacagagtcgtaggaaacagcagatggaaatggaaatagccaagtctgagaagtttggcagtcctaaaaaagatgtagatgaatatgaaagacgtagcctcgttcacgaggtaggcaaaccccctcaagatgtcactgatgactctcctcctagcaaaaagaaaaggatggatcatgtcgattttgatatctgcaccaagcgagaacggaattacagaagttcacgccaaatcagcgaagattctgaaaggactggtggttctcccagtgtccgacatggttccttccatgaagatgaggatcccataggctcccctaggctactgtcagtaaaagggtctcctaaagtagatgaaaaagtcctcccctattctaacataacagtcagggaagagtctttaaaatttaatccttatgattctagcaggagagaacagatggcagatatggccaaaataaaactatctgtcttgaattctgaagatgaactaaatcgttgggactctcagatgaaacaggatgctggcagatttgatgtgagtttcccaaacagcataattaagagagatagccttcgaaaaaggtctgtacgagatctggaacctggtgaggtgccttctgattctgacgaagatggtgaacacaaatcccactcacccagagcctctgcattatatgaaagttctcgattgtcttttttattgagggacagagaagacaagctacgtgagcgagatgaaagactctctagttctttagaaaggaacaaattttactcttttgcattggataagacaatcacaccagacactaaagctttgcttgaaagagctaaatccctctcttcatctcgtgaagaaaattggtcttttcttgattgggactcccgatttgcaaattttcgaaacaacaaagataaagaaaaggttgactctgctccaagacctattccatcctggtacatgaaaaagaagaaaattaggactgattcagaagggaaaatggatgataagaaagaggaccataaagaagaagagcaagagaggcaggaattgtttgcttctcgttttttacacagctcaatctttgaacaagattccaagcgattgcagcatctagagagaaaagaggaagattctgacttcatttctggtaggatctatgggaagcagacatctgagggagcaaacagcacaactgattccattcaagaaccagtagttctgttccatagcagatttatggagctcacacggatgcaacagaaagaaaaagaaaaagaccagaaacccaaagaggttgagaaacaggaagatacagagaatcatcccaagaccccagaatctgctcctgagaataaagattcagaactgaaaactccaccttccgttgggcctccaagtgtcacagtcgtaactctagaatcagccccatcagcactagagaagaccactggtgacaaaacggtagaggcgcctttggtaacagaagagaagactgtggagccagctaccgtctcagaagaagcaaagcctgcatctgaacctgctcctgcccctgtggaacagctggaacaagtagacctgcccccaggagcagaccccgataaagaagctgccatgatgcctgcgggtgttgaggaaggttcatcaggtgaccagccgccttatctggatgccaagcctccaactcccggggcctcgttttcccaggcagagagcaacgtagatccagagcctgacagtacccagccactttcaaaaccagctcagaagtctgaggaagccaatgagccaaaggccgaaaagccagacgccactgcagatgctgagcctgatgcaaaccagaaagccgaagctgctcctgagtctcagcccccagcttctgaagatttagaggttgatcctccagttgctgcaaaggataaaaagccaaacaaaagcaagcgttcaaagacccctgttcaggcagctgcagtgagtatcgtggagaagcccgtcacaaggaagagtgagaggatagaccgggaaaaactcaagcggtccaattctcctcggggagaagcacagaagcttttggaattgaagatggaggcagagaagattacaaggactgcttctaaaaactctgctgcagaccttgaacatcccgaaccaagtttgcctctcagccgaacaaggcgccggaatgtaaggagcgtctatgcaaccatgggtgaccatgaaaaccgctctcctgtcaaagagcccgttgagcaaccaagagtgaccagaaagagattggagcgagagcttcaggaggctgcagcggttcccaccacccctcggaggggaaggcctccaaagacacgccggcgagccgatgaagaggaggagaacgaggccaaggaacctgcagaaacactcaagccacctgagggatggcggtcgccaaggtcccagaaaactgcagctggtggtggaccccaagggaaaaagggaaaaaatgaaccgaaggtggatgctacacgtcctgaggccaccactgaggtgggcccccaaataggcgtgaaagagagctccatggaacccaaggctgctgaggaggaggcagggagtgaacagaaacgtgacagaaaagatgctggcacagacaaaaacccccctgaaaccgcccctgttgaagttgtagagaaaaaaccggcccctgaaaaaaactccaaatcaaagagaggaagatctcgaaactccaggttagcagtggacaaatctgcaagtctgaaaaatgtggatgctgctgtcagtcccaggggggctgcagcacaggcaggggagagggaatctggggtggtggcagtctcccctgagaaaagtgagagtccccaaaaggaggatggtttatcatcccagttgaaaagtgatccagttgatccagacaaggaaccagagaaagaagacgtgtctgcctctgggccgtccccagaagccacccagttagccaagcagatggagctggagcaggccgtggaacacatcgcaaagctcgctgaggcctctgcctctgctgcctataaggcagatgcaccagagggccttgccccagaggacagggacaagcctgcacaccaagcaagtgaaacagagctggctgcggccatcggctccatcatcaatgacatttctggggagccagaaaacttcccagcacctccaccttatcctggagaatcccagacagatctgcaaccccccgcaggtgcacaggcgctgcagccttctgaggaaggaatggagacagatgaggctgtatctggcatcctggaaactgaggctgctacagaatcttctaggcctccagtcaatgctcctgacccctcagccggcccaacagataccaaggaagccagaggaaatagcagtgaaacctcacactcagtgccagaagccaaagggtctaaagaagtggaagtcactcttgttcggaaagacaaagggcgccagaaaacaacccgatcacgccgcaagcgaaacacaaacaagaaagtggtggctcctgtagagagccatgtccctgaatccaaccaagctcaaggtgagagtcctgctgcaaatgaggggacaacagtacagcaccccgaagccccacaggaagaaaagcagagtgagaaaccccattccactcctcctcagtcatgtacttctgacctaagcaagattccctccacagagaattcgtcccaagaaatcagtgttgaggaaaggactccaaccaaagcatctgtgcccccagaccttcccccacctccccagccagcaccggtggatgaggagcctcaagccaggttcagggtgcattccatcattgaaagtgacccggtgaccccacccagcgatccaagcatccccatacccacactgccttctgtaactgcagcaaagctctcacctcctgtcgcctctggggggatcccacaccagagcccccctactaaggtgacagagtggatcacaaggcaggaggagccacgggctcagtctactccatctccagctcttcccccagacacaaaggcctctgatgttgacaccagctccagcaccctgaggaagattctcatggaccccaagtatgtgtctgccacaagtgtcacttccacaagtgtcaccacagccattgcagagcctgtcagtgctgccccttgcctacatgaggccccgcccccgccagttgactctaaaaagcctttagaagaaaaaacagcacctccagtgacaaacaactctgagatacaagcctcggaggtgctggtagctgctgacaaggaaaaggtggctccagtcattgctcccaaaattacctctgttattagccggatgcctgtcagcattgacctggaaaattcacagaagataaccttggcaaaaccagctcctcaaaccctcactggtctggtgagcgcactcactggcctggtgaacgtctccctggtcccggtgaatgccctgaaaggccccgtgaagggctcagtgaccacactgaaaagtttggtgagcacccctgctgggcccgtgaacgtcctgaaagggcctgtgaatgttcttacggggccagtgaatgttctcaccactccagtgaacgccacggtgggcacagtgaatgccgccccaggcacagtcaatgccgctgcgagtgcagtgaatgccacagcaagtgcagtgaccgtcacagcgggtgcggttactgctgcatctggtggtgtaacggccacaacaggcacggtgacaatggcaggggcagtgattgcgccgtcaacaaagtgcaaacagagagcgagtgctaatgaaaacagtcggttccacccagggtccatgcctgtgatcgacgatcgtccggcagacgcgggctcaggggcggggctgcgtgtgaacacttctgaaggggttgtgctcctgagttactcagggcagaagaccgaaggcccacagcggatcagcgccaagatcagccagatccccccggccagtgcaatggacattgaatttcagcagtcagtgtccaagtcccaggtcaaacctgattctgtcacagcatcgcagcctccatccaaaggccctcaagctcctgcaggctatgcgaacgtggccacccattccacgttggtactgaccgcccagacatataatgcctctcctgtgatttcgtctgtgaaggccgataggccatccttggagaagcccgagcccattcacctctcggtgtccacgcctgtcacccagggaggcacagtgaaggttctcacccaggggatcaacacaccccctgtgctggttcacaaccagctggtcctcaccccaagcattgtcaccacaaacaagaagcttgctgaccccgtcacccttaaaatcgagaccaaggtccttcagccggccaacctggggtccacgctcacgccccaccaccctcctgctctgcccagcaaactgcctacagaagtcaaccatgtcccctcggggcccagcatcccagcagatcgaactgtctcccatttggcagctgcaaagctagatgctcattctcctcgaccaagtggacccgggccatcctcattcccaagggcaagccaccccagcagtactgcatctacggcgctctccaccaacgccacagtcatgctggctgcaggcatcccagtgccccagttcatctccagcatccacccagagcagtctgtcatcatgccaccccacagcatcacccagactgtgtccctgagccacctctcccagggcgaggtgagaatgaacactcccacgctgcccagtatcacctacagcatccggccagaagcgcttcactctcctcgggctccgctgcagccccagcaaatagaggtcagggccccacagcgtgccagcaccccgcagccagccccagctggtgtgcctgcactggcctcccagcaccctcccgaggaggaagtgcattatcaccttcctgtcgctcgagccacagcccctgtgcagtcagaggtactagtcatgcagtctgagtaccgactgcacccctatactgtgccacgggatgtgaggatcatggtgcatccacatgtgacggcagtcagcgagcagcccagggccgcggatggggtggtgaaggtgccaccagccagcaaggcccctcagcagccagggaaggaagctgccaagacaccagatgccaaagctgcccccacccccacccctgcccccgtccctgtccctgtcccccttcctgcccctgctcctgcccctcatggtgaggcccgtatcctcacagttacccccagtaaccaactccaggggctgcctctgacccctcctgtggtggtgacccatggggtgcagattgtgcactccagcggggagctgtttcaagagtaccggtacggcgacatccgcacctaccaccccccggcccagctcacacacactcagtttcccgccgcttcctctgttggcctgccttcccggaccaagacagctgctcagggccctcctcctgaaggtgagcccctgcagcctcctcagcctgtgcagtccacacagcctgcccagcctgcaccaccctgcccgccctcccagctcggtcagcccggccagccaccaagcagcaagatgcctcaagtgtcccaggaggcaaaggggacccagacgggagtagagcagcctcgcctcccagctggacctgcaaacaggccacctgagcctcacacccaggttcagagggcacaagcagaaacaggcccgacttccttcccctcccctgtgtctgtctccatgaagcctgaccttccagtctctcttcccactcagactgccccaaaacagccgttgtttgtcccaacaacctctggccccagcaccccaccaggactggttctgccacacactgaattccagccagcccccaaacaagattcctctccacacctgacttcccagagacccgtggatatggttcaacttctgaagaagtaccccatcgtgtggcagggcctgctggccctcaagaatgacacagctgctgtgcagctccacttcgtctctggcaacaacgtcctggcccatcggtccctgcccctttctgaaggagggcccccactaaggatcgcccagaggatgcggctggaggcaacgcagctggaaggggttgcccgaaggatgacggtggagacagattactgtctgctgctggctctgccctgtggccgtgaccaagaggatgttgtgagccagaccgagtccctcaaggctgccttcatcacttacctgcaggccaagcaggcggcagggatcatcaacgttcccaaccctggctccaatcagcctgcctacgtgctgcagatcttcccgccctgtgagttctctgagagtcacctgtcccgcctggcccctgacctccttgccagcatctccaacatctctccccacctcatgattgtcattgcctccgtgtga

SEQ ID NO: 195 - DNA, 1125 bp, Homo sapiens
atgtcaagggttccaagtcctccacctccggcagaaatgtcgagtggccccgtagctgagagttggtgctacacacagatcaaggtagtgaaattctcctacatgtggaccatcaataactttagcttttgccgggaggaaatgggtgaagtcattaaaagttctacattttcatcaggagcaaatgataaactgaaatggtgtttgcgagtaaaccccaaagggttagatgaagaaagcaaagattacctgtcactttacctgttactggtcagctgtccaaagagtgaagttcgggcaaaattcaaattctccatcctgaatgccaagggagaagaaaccaaagctatggagagtcaacgggcatataggtttgtgcaaggcaaagactggggattcaagaaattcatccgtagagattttcttttggatgaggccaacgggcttctccctgatgacaagcttaccctcttctgcgaggtgagtgttgtgcaagattctgtcaacatttctggccagaataccatgaacatggtaaaggttcctgagtgccggctggcagatgagttaggaggactgtgggagaattcccggttcacagactgctgcttgtgtgttgccggccaggaattccaggctcacaaggctatcttagcagctcgttctccggtttttagtgccatgtttgaacatgaaatggaggagagcaaaaagaatcgagttgaaatcaatgatgtggagcctgaagtttttaaggaaatgatgtgcttcatttacacggggaaggctccaaacctcgacaaaatggctgatgatttgctggcagctgctgacaagtatgccctggagcgcttaaaggtcatgtgtgaggatgccctctgcagtaacctgtccgtggagaacgctgcagaaattctcatcctggccgacctccacagtgcagatcagttgaaaactcaggcagtggatttcatcaactatcatgcttcggatgtcttggagacctctgggtggaagtcaatggtggtgtcacatccccacttggtggctgaggcataccgctctctggcttcagcacagtgcccttttctgggacccccacgcaaacgcctgaagcaatcctaa

SEQ ID NO: 196 - DNA, 666 bp, Homo sapiens
atgagctacggccgcccccctcccgatgtggagggtatgacctccctcaaggtggacaacctgacctaccgcacctcgcccgacacgctgaggcgcgtcttcgagaagtacgggcgcgtcggcgacgtgtacatcccgcgggaccgctacaccaaggagtcccgcggcttcgccttcgttcgctttcacgacaagcgcgacgctgaggacgctatggatgccatggacggggccgtgctggacggccgcgagctgcgggtgcaaatggcgcgctacggccgccccccggactcacaccacagccgccggggaccgccaccccgcaggtacgggggcggtggctacggacgccggagccgcagccctaggcggcgtcgccgcagccgatcccggagtcggagtcgttccaggtctcgcagccgatctcgctacagccgctcgaagtctcggtcccgcactcgttctcgatctcggtcgacctccaagtccagatccgcacgaaggtccaagtccaagtcctcgtcggtctccagatctcgttcgcggtccaggtcccggtctcggtccaggagtcctcccccagtgtccaagagggaatccaaatccaggtcgcgatcgaagagtccccccaagtctcctgaagaggaaggagcggtgtcctcttaa

SEQ ID NO: 197 - DNA, 3696 bp, Homo sapiens
atgatagcagctccagaaataccaactgattttaatctactacaggagtcagaaacacatttttcttctgacacagattttgaagatatcgaaggaaaaaaccaaaagcaaggcaaaggcaaaacttgtaaaaaaggcaaaaagggcccagcagaaaagggcaaaggtggaaatggaggaggaaaacctccttctggtccaaaccgaatgaatggtcatcaccaacagaatggagtggaaaacatgatgttgtttgaagttgttaaaatgggcaagagtgctatgcagtcggtggtagatgattggatagaatcatacaagcatgaccgagatatagcacttcttgaccttatcaacttttttattcagtgttcaggctgtaaaggagttgtcacagcagaaatgtttagacatatgcagaactctgagataattcgaaaaatgactgaagaattcgatgaggatagtggagattatccacttaccatggctggtcctcagtggaagaagttcaaatccagtttttgtgaattcattggcgtgttagtacggcaatgtcaatatagtatcatatatgatgagtatatgatggatacagtcatttcacttcttacaggattgtctgactcacaagtcagagcatttcgacatacaagcaccctggcagctatgaagttgatgacagctttggtgaatgtggcactaaatcttagcattaatatggataatacacaaagacaatatgaagcagaacggaataaaatgattggaaaacgagccaatgagaggctagaactcctgctacaaaagcggaaagagcttcaggaaaatcaagatgaaatagaaaatatgatgaatgcaatatttaaaggagtgtttgtacatagataccgtgatgcgatagctgaaattcgagctatttgcattgaagagattggcatttggatgaagatgtatagtgatgcctttcttaatgacagttatttaaaatatgttggttggactatgcatgataagcaaggtgaagtaagactcaaatgtcttactgctctacaagggctttattataacaaagagcttaattccaaactggaactttttaccagtcggttcaaggatagaattgtgtctatgacccttgacaaagaatatgatgttgcagtacaagcaataaaattactcactcttgttttacagagtagtgaagaagttctcactgcagaagattgtgaaaatgtctatcatctggtttattcagctcaccggccagtagcagtagcagctggagaatttctctacaaaaagctcttcagtcgtagagatccagaggaggatggaatgatgaaaagaagaggaagacaaggtccaaatgccaaccttgttaagacattggtttttttctttctagaaagtgagttacatgagcatgcagcataccttgtggatagcatgtgggactgtgctactgagctgctgaaagactgggaatgtatgaatagcttgttactggaagagccacttagtggagaggaagcactaacagataggcaagagagtgctctgattgaaataatgctttgtaccattagacaagcggctgaatgtcatcctcccgtgggaagagggacaggaaaaagggtgcttacagcaaaggagaagaagacacagttggatgataggacaaaaatcactgagctttttgccgtggcccttcctcagttattagcaaaatactctgtagatgcagaaaaggtgactaacttgttgcagttgcctcagtactttgatttggaaatatataccactggacgattagaaaagcatttggatgccttattgcgacagatccggaatattgtagagaagcacacagatacagatgttttggaagcatgttctaaaacttaccatgcactctgtaatgaagagttcacaatcttcaacagagtagatatttcaagaagtcaactgatagatgaattggcagataaatttaaccggcttcttgaagattttctgcaagagggtgaagaacctgatgaagatgatgcatatcaggtattgtcaacattgaagaggatcactgcttttcataatgcccatgacctttcaaagtgggatttatttgcttgtaattacaaactcttgaaaactggaatcgaaaatggagacatgcctgagcagattgttattcacgcactgcagtgtactcactatgtaatcctttggcaacttgctaagataactgaaagcagctctacaaaggaggacttgctgcgtttaaagaaacaaatgagagtattttgtcagatatgtcaacattacctgaccaacgtgaatactactgttaaggaacaggccttcactattctgtgtgatattttgatgatcttcagccatcagattatgtcaggagggcgtgacatgttagagccattagtgtatacccctgattcttcattgcagtctgagttgctcagctttattttggatcatgtcttcattgaacaggatgatgataataatagtgcagatggtcagcaagaggatgaagccagtaaaattgaagctctgcacaagagaagaaatttacttgcagcattttgtaagctaattgtatatactgtggtggagatgaatacagctgcagatatcttcaaacagtatatgaagtattataatgactatggagatatcatcaaagaaacaatgagtaaaacaaggcagatagacaaaattcagtgtgctaagacccttattctcagtctgcaacagctttttaatgaaatgatacaagaaaatggctataattttgatagatcatcctctacatttagtggcataaaagaacttgctcgacgttttgctttaacttttggacttgatcagttgaaaacaagagaagccattgccatgctacacaaagatggcatagaatttgcttttaaagagcctaatccgcaaggggagagccatccacctttaaatttggcatttcttgatattctgagtgaattttcttctaaactacttcgacaagacaaaagaacagtgtatgtttacttggaaaagttcatgacctttcagatgtcactccgaagagaggatgtgtggcttccactgatgtcttaccgaaattctttgctagctggtggtgatgatgacaccatgtcagtcattagtggaatcagcagccgggggtcaacagtacggagtaaaaaatcaaaaccatctacaggaaaacggaaagtggttgagggcatgcagctttcactcactgaagaaagtagtagtagtgacagtatgtggttaagcagagaacaaacactgcacacccctgttatgatgcagacaccacaactcacctccactattatgagagagcccaaaagattacggcctgaggatagcttcatgagtgtttatccaatgcagactgaacatcatcaaacacctcttgattataatcggcgtggcacaagcctaatggaagatgatgaagagccaattgtggaagatgttatgatgtcctcagaagggaggattgaggatcttaatgagggaatggattttgacaccatggatatagatttgccaccatcaaagaacagacgagagagaacagaactgaagcctgatttctttgatccagcttcaattatggatgaatcagttcttggagtgtcaatgttttaa

SEQ ID NO: 198 - DNA, 1302 bp, Homo sapiens
atggaggtggtggacccgcagcagctgggcatgttcacggagggcgagctgatgtcggtgggtatggacacgttcatccaccgcatcgactccaccgaggtcatctaccagccgcgccgcaagcgggccaagctcatcggcaagtacctgatgggggacctgctgggggaaggctcttacggcaaggtgaaggaggtgctggactcggagacgctgtgcaggagggccgtcaagatcctcaagaagaagaagttgcgaaggatccccaacggggaggccaacgtgaagaaggaaattcaactactgaggaggttacggcacaaaaatgtcatccagctggtggatgtgttatacaacgaagagaagcagaaaatgtatatggtgatggagtactgcgtgtgtggcatgcaggaaatgctggacagcgtgccggagaagcgtttcccagtgtgccaggcccacgggtacttctgtcagctgattgacggcctggagtacctgcatagccagggcattgtgcacaaggacatcaagccggggaacctgctgctcaccaccggtggcaccctcaaaatctccgacctgggcgtggccgaggcactgcacccgttcgcggcggacgacacctgccggaccagccagggctccccggctttccagccgcccgagattgccaacggcctggacaccttctccggcttcaaggtggacatctggtcggctggggtcaccctctacaacatcaccacgggtctgtaccccttcgaaggggacaacatctacaagttgtttgagaacatcgggaaggggagctacgccatcccgggcgactgtggccccccgctctctgacctgctgaaagggatgcttgagtacgaaccggccaagaggttctccatccggcagatccggcagcacagctggttccggaagaaacatcctccggctgaagcaccagtgcccatcccaccgagcccagacaccaaggaccggtggcgcagcatgactgtggtgccgtacttggaggacctgcacggcgcggacgaggacgaggacctcttcgacatcgaggatgacatcatctacactcaggacttcacggtgcccggacaggtcccagaagaggaggccagtcacaatggacagcgccggggcctccccaaggccgtgtgtatgaacggcacagaggcggcgcagctgagcaccaaatccagggcggagggccgggcccccaaccctgcccgcaaggcctgctccgccagcagcaagatccgccggctgtcggcctgcaagcagcagtga

SEQ ID NO: 199 - DNA, 1095 bp, Homo sapiens
atgcaaaagtggttttctgctttcgatgatgcaatcattcagcgacagtggcgggcaaacccctcccggggcgggggaggtgtgagcttcacgaaggaggttgacaccaacgtggccaccggcgcccctccacgccgccaacgagtccccgggcgtgcgtgcccttggagggagccaatccgcggccggcgtggggcccggcctggcggaggtgatgctggagggacgcccggggagaccgtacgtcactgctctgcgccggaagaccctattttcaggttctcttccctccattcctaccccttccccggtaccataaaatcccgggatatgagctggaagaggcatcacctgatcccggagacctttggagttaagaggcggcggaagcgagggcctgtggagtcggatcctcttcggggtgagccagggtcggcgcgcgcggctgtctcagaactcatgcagctgttcccgcgaggcctgtttgaggacgcgctgccgcccatcgtgctgaggagccaggtgtacagccttgtgcctgacaggaccgtggccgaccggcagctgaaggagcttcaagagcagggggagatcagaatcgtccagctgggcttcgacttggatgcccatggaattatcttcactgaggactacaggaccagagtcctcaaggcctgtgatggccgaccgtatgctggggcagtgcagaaatttctagcttcagtacttccagcctgtggggaccttagtttccagcaggaccaaatgacacagacctttggcttcagggactcagaaatcacgcatctggtgaatgctggagtcctcaccgtccgagatgctgggagctggtggctagctgtgcctggagctgggagattcatcaagtactttgttaaagggcgccaggctgtccttagcatggtccggaaggcaaagtaccgggaactgctcctatcagagctcctgggccggcgggcgcctgtcgtggtgcggcttggcctcacctaccatgtgcacgacctcattggggcccagctagtggactgcatctctaccacttcaggaaccctcctccgcctgccagagacatga

SEQ ID NO: 200 - DNA, 864 bp, Homo sapiens
atgcgggaccggctgccagacctgacggcgtgtaggaagaatgatgatggagacacagttgttgtggttgagaaagatcatttcatggatgatttcttccatcaggtggaggagattagaaacagtattgataaaataactcaatatgttgaagaagtaaagaaaaaccacagcatcattctttctgcaccaaacccggaaggaaaaataaaagaagagcttgaagatctgaacaaagaaatcaagaaaactgcgaataaaattcgagccaagttaaaggctattgaacaaagttttgatcaggatgagagtgggaaccggacttcagtggatcttcggatacgaagaacccagcattcggtgctgtctcggaagtttgtggaagccatggcggagtacaatgaggcacagactctgtttcgggagcggagcaaaggccgcatccagcgccagctggagataactgggagaaccaccacagacgacgagctagaagagatgctggagagcgggaagccatccatcttcacttccgacattatatcagattcacaaattactagacaagctctcaatgaaatcgagtcacgtcacaaggacatcatgaagctggagaccagcatccgagagttgcatgagatgttcatggacatggctatgtttgtggagactcagggtgaaatgatcaacaacatagaaagaaatgttatgaatgccacagactatgtagaacacgctaaagaagaaacaaaaaaagctatcaaatatcagagcaaggcaagaaggaaattgatgttcattattatttgtgtaattgttttgcttgtgatccttggaattatcctagcaacaacattgtcctag

SEQ ID NO: 201 - DNA, 2427 bp, Homo sapiens
atggctgagcttctcgccagcgcaggatcagcctgttcctgggactttccgagagccccgccctcgttccctcccccagccgccagtaggggaggactcggcggtacccggagcttcaggccccaccggggcgcggagagtcccaggcccggccgggaccgggacggcgtccgagtgccaatggctagctctaggtgtcccgctccccgcgggtgccgctgcctccccggagcttctctcgcatggctggggacagtactgctacttctcgccgactgggtgctgctccggaccgcgctgccccgcatattctccctgctggtgcccaccgcgctgccactgctccgggtctgggcggtgggcctgagccgctgggccgtgctctggctgggggcctgcggggtcctcagggcaacggttggctccaagagcgaaaacgcaggtgcccagggctggctggctgctttgaagccattagctgcggcactgggcttggccctgccgggacttgccttgttccgagagctgatctcatggggagcccccgggtccgcggatagcaccaggctactgcactggggaagtcaccctaccgccttcgttgtcagttatgcagcggcactgcccgcagcagccctgtggcacaaactcgggagcctctgggtgcccggcggtcagggcggctctggaaaccctgtgcgtcggcttctaggctgcctgggctcggagacgcgccgcctctcgctgttcctggtcctggtggtcctctcctctcttggggagatggccattccattctttacgggccgcctcactgactggattctacaagatggctcagccgataccttcactcgaaacttaactctcatgtccattctcaccatagccagtgcagtgctggagttcgtgggtgacgggatctataacaacaccatgggccacgtgcacagccacttgcagggagaggtgtttggggctgtcctgcgccaggagacggagtttttccaacagaaccagacaggtaacatcatgtctcgggtaacagaggacacgtccaccctgagtgattctctgagtgagaatctgagcttatttctgtggtacctggtgcgaggcctatgtctcttggggatcatgctctggggatcagtgtccctcaccatggtcaccctgatcaccctgcctctgcttttccttctgcccaagaaggtgggaaaatggtaccagttgctggaagtgcaggtgcgggaatctctggcaaagtccagccaggtggccattgaggctctgtcggccatgcctacagttcgaagctttgccaacgaggagggcgaagcccagaagtttagggaaaagctgcaagaaataaagacactcaaccagaaggaggctgtggcctatgcagtcaactcctggaccactagtatttcaggtatgctgctgaaagtgggaatcctctacattggtgggcagctggtgaccagtggggctgtaagcagtgggaaccttgtcacatttgttctctaccagatgcagttcacccaggctgtggaggtactgctctccatctaccccagagtacagaaggctgtgggctcctcagagaaaatatttgagtacctggaccgcacccctcgctgcccacccagtggtctgttgactcccttacacttggagggccttgtccagttccaagatgtctcctttgcctacccaaaccgcccagatgtcttagtgctacaggggctgacattcaccctacgccctggcgaggtgacggcgctggtgggacccaatgggtctgggaagagcacagtggctgccctgctgcagaatctgtaccagcccaccgggggacagctgctgttggatgggaagccccttccccaatatgagcaccgctacctgcacaggcaggtggctgcagtgggacaagagccacaggtatttggaagaagtcttcaagaaaatattgcctatggcctgacccagaagccaactatggaggaaatcacagctgctgcagtaaagtctggggcccatagtttcatctctggactccctcagggctatgacacagaggtagacgaggctgggagccagctgtcagggggtcagcgacaggcagtggcgttggcccgagcattgatccggaaaccgtgtgtacttatcctggatgatgccaccagtgccctggatgcaaacagccagttacaggtggagcagctcctgtacgaaagccctgagcggtactcccgctcagtgcttctcatcacccagcacctcagcctggtggagcaggctgaccacatcctctttctggaaggaggcgctatccgggaggggggaacccaccagcagctcatggagaaaaaggggtgctactgggccatggtgcaggctcctgcagatgctccagaatga

SEQ ID NO: 202 - DNA, 2328 bp, Homo sapiens
atggtgggtccggaggatgccggagcctgctcgggaagaaaccccaagttgctcccggtgcctgcgccggaccccgtgggccaggacaggaaggtaatccgggccacgggcggctttggcggaggcgtcggcgctgtggagccgccggaggaggctgacgaggaggaggaggctgacgaggaggaggagacgccgcctcggcagctccttcagcgttacctcgcggcggccggggagcagctggagccggggctctgctactgtccgctccccgctggccaggccggcgccccgccgccctcggcagccccacgatcggacgcctgcctgctgggctcgggctccaaacaccgcggcgcggaggtggctgatggccgcgcgccgcggcacgaaggcatgaccaacggcgactcgggttttctgccgggccgggactgtcgcgatctggaagaggctcgcgggctggcgcgcgccggcggccgggagtcgcgccgccgccgcccctacggccgccttcgcctggaggggcctggcgacgaggacgcggacggcgcgggaagcccgtccgattgggcctctccgcttgaggacccgctgcggagctgctgcctggtggccgcggacgcccaggagcccgagggcgcgggcagcgactcgggggacagccccgccagcagctgcagcagtagcgaggactcagagcagcggggagtcggcgccgggggtcccgaggagggcgcgccccctgccacctcggccgagaggactaatgggggtgcggagccgcgcctgggcttttctgacattcacttcaactctcgcaacacgttccaggtgagccgcggtcagagcgcccgcgatcacctgcccccggcggggccgccggtgcccttgcccgccgcggagcagggtcctgcgggggcttcggcccgggctcgacggagtggcggcttcgcggacttcttcaccagaaacctttttccaaaaaggacaaaggaactcaaatcagttgtccatagtgctcctggttggaaattatttggtaaagtccctcctagagagaatcttcagaaaacatccaaaatcattcagcaggaatatgaagcacgaacggggaggacctgtaaaccaccacctcagtcttcaagacgcaagaattttgaatttgagccgctttctaccactgccttgattcttgaggatcgaccatcaaatcttcctgccaaatctgtggaagaagctttacgtcaccgacaagaatacgatgagatggtggctgaggctaaaaaacgagaaattaaggaagcacataaaagaaaaagaatcatgaaagaacgatttaagcaggaagaaaatattgcaagtgcaatggtaatttggatcaatgaaatactgcccaattgggaagtaatgcgtagtacaagaagagttcgagaattgtggtggcagggattgccccctagtgtccgtgggaaagtttggagtctagctgtaggaaatgaactaaatatcactcctgaactttatgaaatcttcctctcaagagcaaaagaacggtggaaaagtttcagtgaaacaagttcagagaatgatacagaaggtgtatctgttgctgatcgagaggccagtctggaattaattaagttggacatatcccgtacatttccatctctctacatctttcagaagggtggtccatatcatgatgtcttgcatagtattttaggggcatacacatgctacaggcctgatgttggttatgtccaagggatgtccttcattgcagcagtactcattctcaatttggaagaggcagatgcctttatcgcatttgccaatctcctgaataagccatgccagttggccttttttcgtgtggatcacagcatgatgttgaaatattttgcaacatttgaagtattctttgaagaaaatctttccaaattatttcttcacttcaaatcttacagtcttacaccagatatatacttgatagactggatcttcacactatatagcaaatcactaccacttgatctggcctgtcgagtctgggatgtattttgcagagatggggaagaatttttatttaggactggattaggaatcctccgattatatgaagatattctcctgcagatggactttattcatatagcacagtttctaactaaattgccagaagatatcacatcggaaaagctgttcagttgtattgcagccattcagatgcagaatagcaccaaaaaatggactcaggtctttgcatctgtaatgaaggatattaaagaaggagacaagaacagtagtcctgctttgaaaagctag

SEQ ID NO: 203 - DNA, 1545 bp, Homo sapiens
atgagtataagcagtgatgaggtcaacttcttggtatatagatacttgcaagagtcaggattttctcattcagcatttacctttggtatagaaagccatatcagtcagtccaatataaatggtgccctcgtcccacccgctgcattgatttctatcatccagaaaggtctacagtatgtagaagcagaagttagtattaatgaggatggtaccttgtttgatggtcgaccaatagagtctctgtccctgatagatgccgtaatgcctgatgtagtacaaacaagacaacaagcttatagagataagcttgcacagcaacaggcagcagctgctgcagctgccgcagctgcagccagccaacaaggatctgcaaaaaatggagaaaacacagcaaatggggaggagaatggagcacatactatagcaaataatcatactgatatgatggaagtggatggggatgttgaaatccctcctaataaagctgttgtgttgcggggccatgaatctgaagtttttatctgtgcctggaaccctgttagtgatctcctagcatcagggtctggagactcaacagcaagaatatggaatcttagtgagaacagcaccagtggctctacacagttagtacttagacattgtatacgagaaggagggcaagatgttccaagcaacaaggatgtcacatctctagattggaatagtgaaggtacacttctagcaactggttcctatgatgggtttgccagaatatggactaaagatggtaaccttgctagcaccttagggcagcataaaggccctatatttgcattaaaatggaataagaaaggaaatttcatcctaagtgctggagtagacaagactacaattatttgggacgcacatactggtgaagccaagcaacagtttccttttcattcagcaccagcattggatgttgattggcagagcaacaacacctttgcttcttgtagtacagatatgtgcattcatgtctgtaaattaggacaagacagacctattaaaacattccaaggacatacgaatgaagtaaatgctatcaaatgggacccaactggcaatctcttggcctcctgttctgacgacatgactttaaagatatggagtatgaaacaagacaattgtgtccatgatttgcaagcacataataaagaaatttatactatcaaatggagtccaacaggaccagggactaataatccaaatgccaaccttatgttagcaagtgcatcctttgattctactgttaggttatgggatgtagaccgagggatatgcatccataccttgacaaaacaccaagagcctgtgtacagtgtagctttcagtcctgatggcaggtatctggcaagtggttcttttgacaaatgtgtacacatctggaacacgcagacaggtgctctagttcacagctataggggaacaggtggaatatttgaagtttgctggaatgcagcaggagacaaagttggagccagtgcatcagatggttcagtttgtgtattagaccttcggaaatag

SEQ ID NO: 204 - DNA, 2172 bp, Homo sapiens
atgagcctctccatgagagatccggtcattcctgggacaagcatggcctaccatccgttcctacctcaccgggcgccggacttcgccatgagcgcggtgctgggtcaccagccgccgttcttccccgcgctgacgctgcctcccaacggcgcggcggcgctctcgctgccgggcgccctggccaagccgatcatggatcaattggtgggggcggccgagaccggcatcccgttctcctccctggggccccaggcgcatctgaggcctttgaagaccatggagcccgaagaagaggtggaggacgaccccaaggtgcacctggaggctaaagaactttgggatcagtttcacaagcggggcaccgagatggtcattaccaagtcgggaaggcgaatgtttcctccatttaaagtgagatgttctgggctggataaaaaagccaaatacattttattgatggacattatagctgctgatgactgtcgttataaatttcacaattctcggtggatggtggctggtaaggccgaccccgaaatgccaaagaggatgtacattcacccggacagccccgctactggggaacagtggatgtccaaagtcgtcactttccacaaactgaaactcaccaacaacatttcagacaaacatggatttactatattgaactccatgcacaaataccagccccggttccacattgtaagagccaatgacatcttgaaactcccttatagtacatttcggacatacttgttccccgaaactgaattcatcgctgtgactgcataccagaatgataagataacccagttaaaaatagacaacaacccttttgcaaaaggtttccgggacactggaaatggccgaagagaaaaaagaaaacagctcaccctgcagtccatgagggtgtttgatgaaagacacaaaaaggagaatgggacctctgatgagtcctccagtgaacaagcagctttcaactgcttcgcccaggcttcttctccagccgcctccactgtagggacatcgaacctcaaagatttatgtcccagcgagggtgagagcgacgccgaggccgagagcaaagaggagcatggccccgaggcctgcgacgcggccaagatctccaccaccacgtcggaggagccctgccgtgacaagggcagccccgcggtcaaggctcaccttttcgctgctgagcggccccgggacagcgggcggctggacaaagcgtcgcccgactcacgccatagccccgccaccatctcgtccagcactcgcggcctgggcgcggaggagcgcaggagcccggttcgcgagggcacagcgccggccaaggtggaagaggcgcgcgcgctcccgggcaaggaggccttcgcgccgctcacggtgcagacggacgcggccgccgcgcacctggcccagggccccctgcctggcctcggcttcgccccgggcctggcgggccaacagttcttcaacgggcacccgctcttcctgcaccccagccagtttgccatggggggcgccttctccagcatggcggccgctggcatgggtcccctcctggccacggtttctggggcctccaccggtgtctcgggcctggattccacggccatggcctctgccgctgcggcgcagggactgtccggggcgtccgcggccaccctgcccttccacctccagcagcacgtcctggcctctcagggcctggccatgtcccctttcggaagcctgttcccttacccctacacgtacatggccgcagcggcggccgcctcctctgcggcagcctccagctcggtgcaccgccaccccttcctcaatctgaacaccatgcgcccgcggctgcgctacagcccctactccatcccggtgccggtcccggacggcagcagtctgctcaccaccgccctgccctccatggcggcggccgcggggcccctggacggcaaagtcgccgccctggccgccagcccggcctcggtggcagtggactcgggctctgaactcaacagccgctcctccacgctctcctccagctccatgtccttgtcgcccaaactctgcgcggagaaagaggcggccaccagcgaactgcagagcatccagcggttggttagcggcttggaagccaagccggacaggtcccgcagcgcgtccccgtag

SEQ ID NO: 205 - DNA, 339 bp, Homo sapiens
atggatggagaggagaaaacctatggtggctgtgaaggacctgatgccatgtatgtcaaattgatatcatctgatggccatgaatttattgtaaaaagagaacatgcattaacatcaggcacgataaaagccatgttgagtggcccaggtcagtttgctgagaacgaaaccaatgaggtcaattttagagagataccttcacatgtgctatcgaaagtatgcatgtattttacgtacaaggttcgctacactaacagctccaccgagattcctgaattcccaattgcacctgaaattgcactggaactgctgatggctgcgaacttcttagattgttaa

SEQ ID NO: 206 - DNA, 1431 bp, Homo sapiens
atgccgcagctgaacggcggtggaggggatgacctaggcgccaacgacgaactgatttccttcaaagacgagggcgaacaggaggagaagagctccgaaaactcctcggcagagagggatttagctgatgtcaaatcgtctctagtcaatgaatcagaaacgaatcaaaacagctcctccgattccgaggcggaaagacggcctccgcctcgctccgaaagtttccgagacaaatcccgggaaagtttggaagaagcggccaagaggcaagatggagggctctttaaggggccaccgtatcccggctaccccttcatcatgatccccgacctgacgagcccctacctccccaacggatcgctctcgcccaccgcccgaacctatctccagatgaaatggccactgcttgatgtccaggcagggagcctccagagtagacaagccctcaaggatgcccggtccccatcaccggcacacattgtctctaacaaagtgccagtggtgcagcaccctcaccatgtccaccccctcacgcctcttatcacgtacagcaatgaacacttcacgccgggaaacccacctccacacttaccagccgacgtagaccccaaaacaggaatcccacggcctccgcaccctccagatatatccccgtattacccactatcgcctggcaccgtaggacaaatcccccatccgctaggatggttagtaccacagcaaggtcaaccagtgtacccaatcacgacaggaggattcagacacccctaccccacagctctgaccgtcaatgcttccatgtccagctttctgtcttctaggttccctccccatatggtcccaccacatcatacgctacacacgacgggcattccgcatccggccatagtcacaccaacagtcaaacaggaatcgtcccagagtgatgtcggctcactccatagttcaaagcatcaggactccaaaaaggaagaagaaaagaagaagccccacataaagaaacctcttaatgcattcatgttgtatatgaaggaaatgagagcaaaggtcgtagctgagtgcacgttgaaagaaagcgcggccatcaaccagatccttgggcggaggtggcatgcactgtccagagaagagcaagcgaaatactacgagctggcccggaaggagcgacagcttcatatgcaactgtaccccggctggtccgcgcgggataactatggaaagaagaagaagaggaaaagggacaagcagccgggagagaccaatgaacacagcgaatgtttcctaaatccttgcctttcacttcctccgattacagacctgagcgctcctaagaaatgccgagcgcgctttggccttgatcaacagaataactggtgcggcccttgcagatgcaaatactccaaagaagtgtcgggcactgttcgggcttga

SEQ ID NO: 207 - DNA, 1560 bp, Homo sapiens
atgcccttcaatggcgagaagcagtgtgtgggagaggaccagccaagcgattctgattcttcccggttttccgaaagcatggcttcgctcagtgactatgaatgctccaggcagagctttgcaagtgactcctccagcaaatccagctctcctgcttcaacaagccctccaagggttgtaacatttgatgaagtgatggctacagcaaggaacttatcaaacttgactcttgctcatgagattgctgtaaatgagaactttcaattgaaacaagaggctctcccagaaaagagtttggctggtcgagtgaagcacattgttcaccaggccttctgggacgtcttggattcagaactaaatgctgaccctcctgagtttgaacatgccatcaaactgtttgaagaaatcagagagattcttctctcttttctcactcccggtggcaaccggcttcgcaaccaaatctgtgaagttttggacacagacctcattaggcagcaggctgagcacagtgctgttgacatccaaggcctggccaactatgtcatcagtacgatgggaaagctgtgtgctcccgtgcgagataatgatatcagagagttaaaggctactggcaacatcgtggaggtgctgagacaaatattccatgtcctggacctcatgcaaatggacatggccaattttacaattatgagtctcagaccgcaccttcaacgccagttggtggaatatgagagaaccaagttccaggaaattttggaagaaactccaagtgctcttgatcagactacagaatggataaaagaatctgtaaatgaagaattattttctctttctgagagtgctttaactcctggggccgaaaatacctccaagccaagcctgagccctactttggtgctaaataatagttacttgaaactgttacagtgggattatcagaaaaaagaattaccagagacacttatgacagatggagcacgtcttcaggaactaacagaaaagctgaatcaattgaaaattattgcctgcctgtccctaattaccaacaacatggtgggtgctattacaggaggcctgcctgagcttgcaagcaggttaacaaggatttcagctgttctacttgaaggcatgaacaaagagacctttaacttgaaggaagtcctgaattctattggtattcagacttgtgttgaggttaacaagaccctgatggaaagaggtttacccactttaaatgctgagattcaagctaatcttataggtcaattttcaagcattgaagaggaggacaatcctatctggtccttgattgataaacgaattaagctttacatgagaaggctactttgtcttccaagccctcaaaaatgcatgcctcctatgccaggaggcctagctgtcattcagcaggagctagaagccctaggctctcaatatgcaaacattgtgaatctcaacaaacaagtgtatggaccattttatgcaaatatacttcgaaagctgctcttcaatgaggaagccatggggaaggtagatgcttcacctcctactaactaa

SEQ ID NO: 208 - DNA, 1056 bp, Homo sapiens
atgtcctggaacattagtcacccccaactctctgataaactgtttgggaagaatggagtgttggaggagcagaaatctccaggattcaagaaaagagagacagaggtgtatgttggcaatcttccactggatatttctaaggaggaaattctgtaccttctaaaggacttcaaccctcttgatgtccacaaaatccagaatggctgcaaatgctttgcatttgtagatctgggctccatgcagaaagtgacacttgcaatccaggagctgaatggtaaactcttccacaagcgaaaactgttcgtgaatacaagcaaaaggccccccaagaggacccctgatatgatccagcagcctcgggccccgctggtgttggagaaggcttctggtgaaggatttggcaaaaccgccgctattatacagctcgctcctaaagctcctgttgacctgtgtgagacagagaaactgagggcagccttctttgcagtcccgttggaaatgagagggtccttcctggtgctgctcctgagggaatgcttccgagacctgagctggctggcactcatccatagcgtccgtggggaggcggggctgctggtgacgagtatcgtcccgaagaccccgtttttctgggctatgcacgtcactgaggctctgcaccagaacatgcaggctctgtttagcaccctggctcaggcggaggagcagcagccctacctggagggctccaccgttatgcgcgggactcgctgtctggcagagtaccacctgggggattatggacacgcctggaacaggtgttgggtgctggacagggtggacacctgggctgtggtcatgttcattgattttggacagttggccaccatccctgtgcagtctctgcgcagcctagacagcgacgacttctggaccatcccacccctgactcagccattcatgctggagaaagacattttgagttcgtatgaggttgtccatcgaatcctcaaagggaaaatcactggtgctttgaactcggcgttgcacatcctaaagtttgaagagtctaaataa

SEQ ID NO: 209 - DNA, 6009 bp, Homo sapiens
atggaacaggatagaaccaaccatgttgagggcaacagactaagtccattcctgataccatcacctcccatttgccagacagaacctctggctacaaagctccagaatggaagcccactgcctgagagagctcatccagaagtaaatggagacaccaagtggcactctttcaaaagttattatggaataccctgtatgaagggaagccagaatagtcgtgtgagtcctgactttacacaagaaagtagagggtattccaagtgtttgcaaaatggaggaataaaacgcacagttagtgaaccttctctctctgggctccttcagatcaagaaattgaaacaagaccaaaaggctaatggagaaagacgtaacttcggggtaagccaagaaagaaatccaggtgaaagcagtcaaccaaatgtctccgatttgagtgataagaaagaatctgtgagttctgtagcccaagaaaatgcagttaaagatttcaccagtttttcaacacataactgcagtgggcctgaaaatccagagcttcagattctgaatgagcaggaggggaaaagtgctaattaccatgacaagaacattgtattacttaaaaacaaggcagtgctaatgcctaatggtgctacagtttctgcctcttccgtggaacacacacatggtgaactcctggaaaaaacactgtctcaatattatccagattgtgtttccattgcggtgcagaaaaccacatctcacataaatgccattaacagtcaggctactaatgagttgtcctgtgagatcactcacccatcgcatacctcagggcagatcaattccgcacagacctctaactctgagctgcctccaaagccagctgcagtggtgagtgaggcctgtgatgctgatgatgctgataatgccagtaaactagctgcaatgctaaatacctgttcctttcagaaaccagaacaactacaacaacaaaaatcagtttttgagatatgcccatctcctgcagaaaataacatccagggaaccacaaagctagcgtctggtgaagaattctgttcaggttccagcagcaatttgcaagctcctggtggcagctctgaacggtatttaaaacaaaatgaaatgaatggtgcttacttcaagcaaagctcagtgttcactaaggattccttttctgccactaccacaccaccaccaccatcacaattgcttctttctccccctcctcctcttccacaggttcctcagcttccttcagaaggaaaaagcactctgaatggtggagttttagaagaacaccaccactaccccaaccaaagtaacacaacacttttaagggaagtgaaaatagagggtaaacctgaggcaccaccttcccagagtcctaatccatctacacatgtatgcagcccttctccgatgctttctgaaaggcctcagaataattgtgtgaacaggaatgacatacagactgcagggacaatgactgttccattgtgttctgagaaaacaagaccaatgtcagaacacctcaagcataacccaccaatttttggtagcagtggagagctacaggacaactgccagcagttgatgagaaacaaagagcaagagattctgaagggtcgagacaaggagcaaacacgagatcttgtgcccccaacacagcactatctgaaaccaggatggattgaattgaaggcccctcgttttcaccaagcggaatcccatctaaaacgtaatgaggcatcactgccatcaattcttcagtatcaacccaatctctccaatcaaatgacctccaaacaatacactggaaattccaacatgcctggggggctcccaaggcaagcttacacccagaaaacaacacagctggagcacaagtcacaaatgtaccaagttgaaatgaatcaagggcagtcccaaggtacagtggaccaacatctccagttccaaaaaccctcacaccaggtgcacttctccaaaacagaccatttaccaaaagctcatgtgcagtcactgtgtggcactagatttcattttcaacaaagagcagattcccaaactgaaaaacttatgtccccagtgttgaaacagcacttgaatcaacaggcttcagagactgagccattttcaaactcacaccttttgcaacataagcctcataaacaggcagcacaaacacaaccatcccagagttcacatctccctcaaaaccagcaacagcagcaaaaattacaaataaagaataaagaggaaatactccagacttttcctcacccccaaagcaacaatgatcagcaaagagaaggatcattctttggccagactaaagtggaagaatgttttcatggtgaaaatcagtattcaaaatcaagcgagttcgagactcataatgtccaaatgggactggaggaagtacagaatataaatcgtagaaattccccttatagtcagaccatgaaatcaagtgcatgcaaaatacaggtttcttgttcaaacaatacacacctagtttcagagaataaagaacagactacacatcctgaactttttgcaggaaacaagacccaaaacttgcatcacatgcaatattttccaaataatgtgatcccaaagcaagatcttcttcacaggtgctttcaagaacaggagcagaagtcacaacaagcttcagttctacagggatataaaaatagaaaccaagatatgtctggtcaacaagctgcgcaacttgctcagcaaaggtacttgatacataaccatgcaaatgtttttcctgtgcctgaccagggaggaagtcacactcagacccctccccagaaggacactcaaaagcatgctgctctaaggtggcatctcttacagaagcaagaacagcagcaaacacagcaaccccaaactgagtcttgccatagtcagatgcacaggccaattaaggtggaacctggatgcaagccacatgcctgtatgcacacagcaccaccagaaaacaaaacatggaaaaaggtaactaagcaagagaatccacctgcaagctgtgataatgtgcagcaaaagagcatcattgagaccatggagcagcatctgaagcagtttcacgccaagtcgttatttgaccataaggctcttactctcaaatcacagaagcaagtaaaagttgaaatgtcagggccagtcacagttttgactagacaaaccactgctgcagaacttgatagccacaccccagctttagagcagcaaacaacttcttcagaaaagacaccaaccaaaagaacagctgcttctgttctcaataattttatagagtcaccttccaaattactagatactcctataaaaaatttattggatacacctgtcaagactcaatatgatttcccatcttgcagatgtgtagagcaaattattgaaaaagatgaaggtcctttttatacccatctaggagcaggtcctaatgtggcagctattagagaaatcatggaagaaaggtttggacagaagggtaaagctattaggattgaaagagtcatctatactggtaaagaaggcaaaagttctcagggatgtcctattgctaagtgggtggttcgcagaagcagcagtgaagagaagctactgtgtttggtgcgggagcgagctggccacacctgtgaggctgcagtgattgtgattctcatcctggtgtgggaaggaatcccgctgtctctggctgacaaactctactcggagcttaccgagacgctgaggaaatacggcacgctcaccaatcgccggtgtgccttgaatgaagagagaacttgcgcctgtcaggggctggatccagaaacctgtggtgcctccttctcttttggttgttcatggagcatgtactacaatggatgtaagtttgccagaagcaagatcccaaggaagtttaagctgcttggggatgacccaaaagaggaagagaaactggagtctcatttgcaaaacctgtccactcttatggcaccaacatataagaaacttgcacctgatgcatataataatcagattgaatatgaacacagagcaccagagtgccgtctgggtctgaaggaaggccgtccattctcaggggtcactgcatgtttggacttctgtgctcatgcccacagagacttgcacaacatgcagaatggcagcacattggtatgcactctcactagagaagacaatcgagaatttggaggaaaacctgaggatgagcagcttcacgttctgcctttatacaaagtctctgacgtggatgagtttgggagtgtggaagctcaggaggagaaaaaacggagtggtgccattcaggtactgagttcttttcggcgaaaagtcaggatgttagcagagccagtcaagacttgccgacaaaggaaactagaagccaagaaagctgcagctgaaaagctttcctccctggagaacagctcaaataaaaatgaaaaggaaaagtcagccccatcacgtacaaaacaaactgaaaacgcaagccaggctaaacagttggcagaacttttgcgactttcaggaccagtcatgcagcagtcccagcagccccagcctctacagaagcagccaccacagccccagcagcagcagagaccccagcagcagcagccacatcaccctcagacagagtctgtcaactcttattctgcttctggatccaccaatccatacatgagacggcccaatccagttagtccttatccaaactcttcacacacttcagatatctatggaagcaccagccctatgaacttctattccacctcatctcaagctgcaggttcatatttgaattcttctaatcccatgaacccttaccctgggcttttgaatcagaatacccaatatccatcatatcaatgcaatggaaacctatcagtggacaactgctccccatatctgggttcctattctccccagtctcagccgatggatctgtataggtatccaagccaagaccctctgtctaagctcagtctaccacccatccatacactttaccagccaaggtttggaaatagccagagttttacatctaaatacttaggttatggaaaccaaaatatgcagggagatggtttcagcagttgtaccattagaccaaatgtacatcatgtagggaaattgcctccttatcccactcatgagatggatggccacttcatgggagccacctctagattaccacccaatctgagcaatccaaacatggactataaaaatggtgaacatcattcaccttctcacataatccataactacagtgcagctccgggcatgttcaacagctctcttcatgccctgcatctccaaaacaaggagaatgacatgctttcccacacagctaatgggttatcaaagatgcttccagctcttaaccatgatagaactgcttgtgtccaaggaggcttacacaaattaagtgatgctaatggtcaggaaaagcagccattggcactagtccagggtgtggcttctggtgcagaggacaacgatgaggtctggtcagacagcgagcagagctttctggatcctgacattgggggagtggccgtggctccaactcatgggtcaattctcattgagtgtgcaaagcgtgagctgcatgccacaacccctttaaagaatcccaataggaatcaccccaccaggatctccctcgtcttttaccagcataagagcatgaatgagccaaaacatggcttggctctttgggaagccaaaatggctgaaaaagcccgtgagaaagaggaagagtgtgaaaagtatggcccagactatgtgcctcagaaatcccatggcaaaaaagtgaaacgggagcctgctgagccacatgaaacttcagagcccacttacctgcgtttcatcaagtctcttgccgaaaggaccatgtccgtgaccacagactccacagtaactacatctccatatgccttcactcgggtcacagggccttacaacagatatatatga

SEQ ID NO: 210 - DNA, 1704 bp, Homo sapiens
atgggtcgggggctgctcaggggcctgtggccgctgcacatcgtcctgtggacgcgtatcgccagcacgatcccaccgcacgttcagaagtcggttaataacgacatgatagtcactgacaacaacggtgcagtcaagtttccacaactgtgtaaattttgtgatgtgagattttccacctgtgacaaccagaaatcctgcatgagcaactgcagcatcacctccatctgtgagaagccacaggaagtctgtgtggctgtatggagaaagaatgacgagaacataacactagagacagtttgccatgaccccaagctcccctaccatgactttattctggaagatgctgcttctccaaagtgcattatgaaggaaaaaaaaaagcctggtgagactttcttcatgtgttcctgtagctctgatgagtgcaatgacaacatcatcttctcagaagaatataacaccagcaatcctgacttgttgctagtcatatttcaagtgacaggcatcagcctcctgccaccactgggagttgccatatctgtcatcatcatcttctactgctaccgcgttaaccggcagcagaagctgagttcaacctgggaaaccggcaagacgcggaagctcatggagttcagcgagcactgtgccatcatcctggaagatgaccgctctgacatcagctccacgtgtgccaacaacatcaaccacaacacagagctgctgcccattgagctggacaccctggtggggaaaggtcgctttgctgaggtctataaggccaagctgaagcagaacacttcagagcagtttgagacagtggcagtcaagatctttccctatgaggagtatgcctcttggaagacagagaaggacatcttctcagacatcaatctgaagcatgagaacatactccagttcctgacggctgaggagcggaagacggagttggggaaacaatactggctgatcaccgccttccacgccaagggcaacctacaggagtacctgacgcggcatgtcatcagctgggaggacctgcgcaagctgggcagctccctcgcccgggggattgctcacctccacagtgatcacactccatgtgggaggcccaagatgcccatcgtgcacagggacctcaagagctccaatatcctcgtgaagaacgacctaacctgctgcctgtgtgactttgggctttccctgcgtctggaccctactctgtctgtggatgacctggctaacagtgggcaggtgggaactgcaagatacatggctccagaagtcctagaatccaggatgaatttggagaatgttgagtccttcaagcagaccgatgtctactccatggctctggtgctctgggaaatgacatctcgctgtaatgcagtgggagaagtaaaagattatgagcctccatttggttccaaggtgcgggagcacccctgtgtcgaaagcatgaaggacaacgtgttgagagatcgagggcgaccagaaattcccagcttctggctcaaccaccagggcatccagatggtgtgtgagacgttgactgagtgctgggaccacgacccagaggcccgtctcacagcccagtgtgtggcagaacgcttcagtgagctggagcatctggacaggctctcggggaggagctgctcggaggagaagattcctgaagacggctccctaaacactaccaaatag

SEQ ID NO: 211 - DNA, 702 bp, Homo sapiens
atgagcactgaaagcatgatccgggacgtggagctggccgaggaggcgctccccaagaagacaggggggccccagggctccaggcggtgcttgttcctcagcctcttctccttcctgatcgtggcaggcgccaccacgctcttctgcctgctgcactttggagtgatcggcccccagagggaagagttccccagggacctctctctaatcagccctctggcccaggcagtcagatcatcttctcgaaccccgagtgacaagcctgtagcccatgttgtagcaaaccctcaagctgaggggcagctccagtggctgaaccgccgggccaatgccctcctggccaatggcgtggagctgagagataaccagctggtggtgccatcagagggcctgtacctcatctactcccaggtcctcttcaagggccaaggctgcccctccacccatgtgctcctcacccacaccatcagccgcatcgccgtctcctaccagaccaaggtcaacctcctctctgccatcaagagcccctgccagagggagaccccagagggggctgaggccaagccctggtatgagcccatctatctgggaggggtcttccagctggagaagggtgaccgactcagcgctgagatcaatcggcccgactatctcgactttgccgagtctgggcaggtctactttgggatcattgccctgtga

SEQ ID NO: 212 - DNA, 852 bp, Homo sapiens
atggagcctcctggagactgggggcctcctccctggagatccacccccaaaaccgacgtcttgaggctggtgctgtatctcaccttcctgggagccccctgctacgccccagctctgccgtcctgcaaggaggacgagtacccagtgggctccgagtgctgccccaagtgcagtccaggttatcgtgtgaaggaggcctgcggggagctgacgggcacagtgtgtgaaccctgccctccaggcacctacattgcccacctcaatggcctaagcaagtgtctgcagtgccaaatgtgtgacccagccatgggcctgcgcgcgagccggaactgctccaggacagagaacgccgtgtgtggctgcagcccaggccacttctgcatcgtccaggacggggaccactgcgccgcgtgccgcgcttacgccacctccagcccgggccagagggtgcagaagggaggcaccgagagtcaggacaccctgtgtcagaactgccccccggggaccttctctcccaatgggaccctggaggaatgtcagcaccagaccaagtgcagctggctggtgacgaaggccggagctgggaccagcagctcccactgggtatggtggtttctctcagggagcctcgtcatcgtcattgtttgctccacagttggcctaatcatatgtgtgaaaagaagaaagccaaggggtgatgtagtcaaggtgatcgtctccgtccagcggaaaagacaggaggcagaaggtgaggccacagtcattgaggccctgcaggcccctccggacgtcaccacggtggccgtggaggagacaataccctcattcacggggaggagcccaaaccactga

SEQ ID NO: 213 - DNA, 1026 bp, Homo sapiens
atggaggagccgcagtcagatcctagcgtcgagccccctctgagtcaggaaacattttcagacctatggaaactacttcctgaaaacaacgttctgtcccccttgccgtcccaagcaatggatgatttgatgctgtccccggacgatattgaacaatggttcactgaagacccaggtccagatgaagctcccagaatgccagaggctgctccccccgtggcccctgcaccagcagctcctacaccggcggcccctgcaccagccccctcctggcccctgtcatcttctgtcccttcccagaaaacctaccagggcagctacggtttccgtctgggcttcttgcattctgggacagccaagtctgtgacttgcacgtactcccctgccctcaacaagatgttttgccaactggccaagacctgccctgtgcagctgtgggttgattccacacccccgcccggcacccgcgtccgcgccatggccatctacaagcagtcacagcacatgacggaggttgtgaggcgctgcccccaccatgagcgctgctcagatagcgatggtctggcccctcctcagcatcttatccgagtggaaggaaatttgcgtgtggagtatttggatgacagaaacacttttcgacatagtgtggtggtgccctatgagccgcctgaggttggctctgactgtaccaccatccactacaactacatgtgtaacagttcctgcatgggcggcatgaaccggaggcccatcctcaccatcatcacactggaagactccagtggtaatctactgggacggaacagctttgaggtgcgtgtttgtgcctgtcctgggagagaccggcgcacagaggaagagaatctccgcaagaaaggggagcctcaccacgagctgcccccagggagcactaagcgagcactgcccaacaacaccagctcctctccccagccaaagaagaaaccactggatggagaatatttcacccttcaggaccagaccagctttcaaaaagaaaattgttaa

SEQ ID NO: 214 - DNA, 5934 bp, Homo sapiens
atgcctggggagcagatggaccctactggaagtcagttggattcagatttctctcagcaagatactccttgcctgataattgaagattctcagcctgaaagccaggttctagaggatgattctggttctcacttcagtatgctatctcgacaccttcctaatctccagacgcacaaagaaaatcctgtgttggatgttgtgtccaatcctgaacaaacagctggagaagaacgaggagacggtaatagtgggttcaatgaacatttgaaagaaaacaaggttgcagaccctgtggattcttctaacttggacacatgtggttccatcagtcaggtcattgagcagttacctcagccaaacaggacaagcagtgttctgggaatgtcagtggaatctgctcctgctgtggaggaagagaagggagaagagttggaacagaaggagaaagagaaggaagaagatacttcaggcaatactacacattcccttggtgctgaagatactgcctcatcacagttgggttttggggttctggaactctcccagagccaggatgttgaggaaaatactgtgccatatgaagtggacaaagagcagctacaatcagtaaccaccaactctggttataccaggctgtctgatgtggatgctaatactgcaattaagcatgaagaacagtccaacgaagatatccccatagcagaacagtccagcaaggacatccctgtgacagcacagcccagtaaggatgtacatgttgtaaaagagcaaaatccaccacctgcaaggtcagaggacatgccttttagccccaaagcatctgttgctgctatggaagcaaaagaacagttgtctgcacaagaacttatggaaagtggactgcagattcagaagtcaccagagcctgaggttttgtcaactcaggaagacttgtttgaccagagcaataaaacagtatcttctgatggttgctctactccttcaagggaggaaggtgggtgttctttggcttccactcctgccaccactctgcatctcctgcagctctctggtcagaggtcccttgttcaggacagtctttccacgaattcttcagatcttgttgctccttctcctgatgctttccgatctactccttttatcgttcctagcagtcccacagagcaagaagggagacaagataagccaatggacacgtcagtgttatctgaagaaggaggagagccttttcagaagaaacttcaaagtggtgaaccagtggagttagaaaacccccctctcctgcctgagtccactgtatcaccacaagcctcaacaccaatatctcagagcacaccagtcttccctcctgggtcacttcctatcccatcccagcctcagttttctcatgacatttttattccttccccaagtctggaagaacaatcaaatgatgggaagaaagatggagatatgcatagttcatctttgacagttgagtgttctaaaacttcagagattgaaccaaagaattcccctgaggatcttgggctatctttgacaggggattcttgcaagttgatgctttctacaagtgaatatagtcagtccccaaagatggagagcttgagttctcacagaattgatgaagatggagaaaacacacagattgaggatacggaacccatgtctccagttctcaattctaaatttgttcctgctgaaaatgatagtatcctgatgaatccagcacaggatggtgaagtacaactgagtcagaatgatgacaaaacaaagggagatgatacagacaccagggatgacattagtattttagccactggttgcaagggcagagaagaaacggtagcagaagatgtttgtattgatctcacttgtgattcggggagtcaggcagttccgtcaccagctactcgatctgaggcactttctagtgtgttagatcaggaggaagctatggaaattaaagaacaccatccagaggaggggtcttcagggtctgaggtggaagaaatccctgagacaccttgtgaaagtcaaggagaggaactcaaagaagaaaatatggagagtgttccgttgcacctttctctgactgaaactcagtcccaagggttgtgtcttcaaaaggaaatgccaaaaaaagaatgctcagaagctatggaagttgaaaccagtgtgattagtattgattcccctcaaaagttggcaatacttgaccaagaattggaacataaggaacaggaagcttgggaagaagctacttcagaggactccagtgttgtcattgtagatgtgaaagagccatctcccagagttgatgtttcttgtgaacctttggagggagtggagaagtgctcagattcccagtcatgggaggatattgctccagaaatagaaccatgtgctgagaatagattagacaccaaggaagaaaagagtgtagaatatgaaggagatctgaaatcagggactgcagaaacagaacctgtagagcaagattcttcacagccttccttacctttagtgagagcagatgatcctttaagacttgaccaggagttgcagcagccccaaactcaggagaaaacaagtaattcattaacagaagactcaaaaatggctaatgcaaagcagctaagctcagatgcagaggcccagaagctggggaagccctctgcccatgcctcacaaagcttctgtgaaagttctagtgaaaccccatttcatttcactttgcctaaagaaggtgatatcatcccaccattgactggtgcaaccccacctcttattgggcacctaaaattggagcccaagagacacagtactcctattggtattagcaactatccagaaagcaccatagcaaccagtgatgtcatgtctgaaagcatggtggagacccatgatcccatacttgggagtggaaaaggggattctggggctgccccagacgtggatgataaattatgtctaagaatgaaactggttagtcctgagactgaggcgagtgaagagtctttgcagttcaacctggaaaagcctgcaactggtgaaagaaaaaatggatctactgctgttgctgagtctgttgccagtccccagaagaccatgtctgtgttgagctgtatctgtgaagccaggcaagagaatgaggctcgaagtgaggatccccccaccacacccatcagggggaacttgctccactttccaagttctcaaggagaagaggagaaagaaaaattggagggtgaccatacaatcaggcagagtcaacagcctatgaagcccattagtcctgtcaaggaccctgtttctcctgcttcccagaagatggtcatacaagggccatccagtcctcaaggagaggcaatggtgacagatgtgctagaagaccagaaagaaggacggagtactaataaggaaaatcctagtaaggccttgattgaaaggcccagccaaaataacataggaatccaaaccatggagtgttccttgagggtcccagaaactgtttcagcagcaacccagactataaagaatgtgtgtgagcaggggaccagtacagtggaccagaactttggaaagcaagatgccacagttcagactgagagggggagtggtgagaaaccagtcagtgctcctggggatgatacagagtcgctccatagccagggagaagaagagtttgatatgcctcagcctccacatggccatgtcttacatcgtcacatgagaacaatccgggaagtacgcacacttgtcactcgtgtcattacagatgtgtattatgtggatggaacagaagtagaaagaaaagtaactgaggagactgaagagccaattgtagagtgtcaggagtgtgaaactgaagtttccccttcacagactgggggctcctcaggtgacctgggggatatcagctccttctcctccaaggcatccagcttacaccgcacatcaagtgggacaagtctctcagctatgcacagcagtggaagctcagggaaaggagccggaccactcagagggaaaaccagcgggacagaacccgcagattttgccttacccagctcccgaggaggcccaggaaaactgagtcctagaaaaggggtcagtcagacagggacgccagtgtgtgaggaggatggtgatgcaggccttggcatcagacagggagggaaggctccagtcacgcctcgtgggcgtgggcgaaggggccgcccaccttctcggaccactggaaccagagaaacagctgtgcctggccccttgggcatagaggacatttcacctaacttgtcaccagatgataaatccttcagccgtgtcgtgccccgagtgccagactccaccagacgaacagatgtgggtgctggtgctttgcgtcgtagtgactctccagaaattcctttccaggctgctgctggcccttctgatggcttagatgcctcctctccaggaaatagctttgtagggctccgtgttgtagccaagtggtcatccaatggctacttttactctgggaaaatcacacgagatgtcggagctgggaagtataaattgctctttgatgatgggtacgaatgtgatgtgttgggcaaagacattctgttatgtgaccccatcccgctggacactgaagtgacggccctctcggaggatgagtatttcagtgcaggagtggtgaaaggacataggaaggagtctggggaactgtactacagcattgaaaaagaaggccaaagaaagtggtataagcgaatggctgtcatcctgtccttggagcaaggaaacagactgagagagcagtatgggcttggcccctatgaagcagtaacacctcttacaaaggcagcagatatcagcttagacaatttggtggaagggaagcggaaacggcgcagtaacgtcagctccccagccacccctactgcctccagtagcagcagcacaacccctacccgaaagatcacagaaagtcctcgtgcctccatgggagttctctcaggcaaaagaaaacttatcacttctgaagaggaacggtcccctgccaagcgaggtcgcaagtctgccacagtaaaacctggtgcagtaggggcaggagagtttgtgagcccctgtgagagtggagacaacaccggtgaaccctctgccctggaagagcagagagggcctttgcctctcaacaagaccttgtttctgggctacgcatttctccttaccatggccacaaccagtgacaagttggccagccgctccaaactgccagatggtcctacaggaagcagtgaagaagaggaggaatttttggaaattcctcctttcaacaagcagtatacagaatcccagcttcgagcaggagctggctatatccttgaagatttcaatgaagcccagtgtaacacagcttaccagtgtcttctaattgcggatcagcattgtcgaacccggaagtacttcctgtgccttgccagtgggattccttgtgtgtctcatgtctgggtccatgatagttgccatgccaaccagctccagaactaccgtaattatctgttgccagctgggtacagccttgaggagcaaagaattctggactggcaaccccgtgaaaatcctttccagaatctgaaggtactcttggtatcagaccaacagcagaacttcctggagctctggtctgagatcctcatgactggtggtgcagcctctgtgaagcagcaccattcaagtgcccataacaaagatattgctttaggggtatttgatgtggtggtgacggacccctcatgcccagcctcggtgctgaagtgtgctgaagcattgcagctgcctgtggtgtcacaagagtgggtgatccagtgcctcattgttggggagagaattggattcaagcagcatccaaaatataaacacgattatgtttctcactaa

SEQ ID NO: 215 - DNA, 2244 bp, Homo sapiens
atgtcacaagttaaaagctcttattcctatgatgccccctcggatttcatcaatttttcatccttggatgatgaaggagatactcaaaacatagattcatggtttgaggagaaggccaatttggagaataagttactggggaagaatggaactggagggctttttcagggcaaaactcctttgagaaaggctaatcttcagcaagctattgtcacacctttgaaaccagttgacaacacttactacaaagaggcagaaaaagaaaatcttgtggaacaatccattccgtcaaatgcttgttcttccctggaagttgaggcagccatatcaagaaaaactccagcccagcctcagagaagatctcttaggctttctgctcagaaggatttggaacagaaagaaaagcatcatgtaaaaatgaaagccaagagatgtgccactcctgtaatcatcgatgaaattctaccctctaagaaaatgaaagtttctaacaacaaaaagaagccagaggaagaaggcagtgctcatcaagatactgctgaaaagaatgcatcttccccagagaaagccaagggtagacatactgtgccttgtatgccacctgcaaagcagaagtttctaaaaagtactgaggagcaagagctggagaagagtatgaaaatgcagcaagaggtggtggagatgcggaaaaagaatgaagaattcaagaaacttgctctggctggaatagggcaacctgtgaagaaatcagtgagccaggtcaccaaatcagttgacttccacttccgcacagatgagcgaatcaaacaacatcctaagaaccaggaggaatataaggaagtgaactttacatctgaactacgaaagcatccttcatctcctgcccgagtgactaagggatgtaccattgttaagcctttcaacctgtcccaaggaaagaaaagaacatttgatgaaacagtttctacatatgtgccccttgcacagcaagttgaagacttccataaacgaacccctaacagatatcatttgaggagcaagaaggatgatattaacctgttaccctccaaatcttctgtgaccaagatttgcagagacccacagactcctgtactgcaaaccaaacaccgtgcacgggctgtgacctgcaaaagtacagcagagctggaggctgaggagctcgagaaattgcaacaatacaaattcaaagcacgtgaacttgatcccagaatacttgaaggtgggcccatcttgcccaagaaaccacctgtgaaaccacccaccgagcctattggctttgatttggaaattgagaaaagaatccaggagcgagaatcaaagaagaaaacagaggatgaacactttgaatttcattccagaccttgccctactaagattttggaagatgttgtgggtgttcctgaaaagaaggtacttccaatcaccgtccccaagtcaccagcctttgcattgaagaacagaattcgaatgcccaccaaagaagatgaggaagaggacgaaccggtagtgataaaagctcaacctgtgccacattatggggtgccttttaagccccaaatcccagaggcaagaactgtggaaatatgccctttctcgtttgattctcgagacaaagaacgtcagttacagaaggagaagaaaataaaagaactgcagaaaggggaggtgcccaagttcaaggcacttcccttgcctcattttgacaccattaacctgccagagaagaaggtaaagaatgtgacccagattgaacctttctgcttggagactgacagaagaggtgctctgaaggcacagacttggaagcaccagctggaagaagaactgagacagcagaaagaagcagcttgtttcaaggctcgtccaaacaccgtcatctctcaggagccctttgttcccaagaaagagaagaaatcagttgctgagggcctttctggttctctagttcaggaaccttttcagctggctactgagaagagagccaaagagcggcaggagctggagaagagaatggctgaggtagaagcccagaaagcccagcagttggaggaggccagactacaggaggaagagcagaaaaaagaggagctggccaggctacggagagaactggtgcataaggcaaatccaatacgcaagtaccagggtctggagataaagtcaagtgaccagcctctgactgtgcctgtatctcccaaattctccactcgattccactgctaa

SEQ ID NO: 216 - DNA, 1632 bp, Homo sapiens
atggagtcgagtaaaaagatggactctcctggcgcgctgcagactaacccgccgctaaagctgcacactgaccgcagtgctgggacgccagtttttgtccctgaacaaggaggttacaaggaaaagtttgtgaagaccgtggaggacaagtacaagtgtgagaagtgccacctggtgctgtgcagcccgaagcagaccgagtgtgggcaccgcttctgcgagagctgcatggcggccctgctgagctcttcaagtccaaaatgtacagcgtgtcaagagagcatcgttaaagataaggtgtttaaggataattgctgcaagagagaaattctggctcttcagatctattgtcggaatgaaagcagaggttgtgcagagcagttaatgctgggacatctgctggtgcatttaaaaaatgattgccattttgaagaacttccatgtgtgcgtcctgactgcaaagaaaaggtcttgaggaaagacctgcgagaccacgtggagaaggcgtgtaaataccgggaagccacatgcagccactgcaagagtcaggttccgatgatcgcgctgcagaaacacgaagacaccgactgtccctgcgtggtggtgtcctgccctcacaagtgcagcgtccagactctcctgaggagcgaggggacaaaccagcagatcaaggcccacgaggccagctccgccgtgcagcacgtcaacctgctgaaggagtggagcaactcgctcgaaaagaaggtttccttgttgcagaatgaaagtgtagaaaaaaacaagagcatacaaagtttgcacaatcagatatgtagctttgaaattgaaattgagagacaaaaggaaatgcttcgaaataatgaatccaaaatccttcatttacagcgagtgatagacagccaagcagagaaactgaaggagcttgacaaggagatccggcccttccggcagaactgggaggaagcagacagcatgaagagcagcgtggagtccctccagaaccgcgtgaccgagctggagagcgtggacaagagcgcggggcaagtggctcggaacacaggcctgctggagtcccagctgagccggcatgaccagatgctgagtgtgcacgacatccgcctagccgacatggacctgcgcttccaggtcctggagaccgccagctacaatggagtgctcatctggaagattcgcgactacaagcggcggaagcaggaggccgtcatggggaagaccctgtccctttacagccagcctttctacactggttactttggctataagatgtgtgccagggtctacctgaacggggacgggatggggaaggggacgcacttgtcgctgttttttgtcatcatgcgtggagaatatgatgccctgcttccttggccgtttaagcagaaagtgacactcatgctgatggatcaggggtcctctcgacgtcatttgggagatgcattcaagcccgaccccaacagcagcagcttcaagaagcccactggagagatgaatatcgcctctggctgcccagtctttgtggcccaaactgttctagaaaatgggacatatattaaagatgatacaatttttattaaagtcatagtggatacttcggatctgcccgatccctga

SEQ ID NO: 217 - DNA, 1725 bp, Homo sapiens
atggctaccctggttgtaaacaagctcggagcgggagtagacagtggccggcagggcagccgggggacagctgtagtgaaggtgctagagtgtggagtttgtgaagatgtcttttctttgcaaggagacaaagttccccgtcttttgctttgtggccataccgtctgtcatgactgtctcactcgcctacctcttcatggaagagcaatccgttgcccatttgatcgacaagtaacagacctaggtgattcaggtgtctggggattgaaaaaaaattttgctttattggagcttttggaacgactgcagaatgggcctattggtcagtatggagctgcagaagaatccattgggatatctggagagagcatcattcgttgtgatgaagatgaagctcaccttgcctctgtatattgcactgtgtgtgcaactcatttgtgctctgagtgttctcaagttactcattctacaaagacattagcaaagcacaggcgagttcctctagctgataaacctcatgagaaaactatgtgctctcagcaccaggtgcatgccattgagtttgtttgcttggaagaaggttgtcaaactagcccactcatgtgctgtgtctgcaaagaatatggaaaacaccagggtcacaagcattcagtattggaaccagaagctaatcagatccgagcatcaattttagatatggctcactgcatacggaccttcacagaggaaatctcagattattccagaaaattagttggaattgtgcagcacattgaaggaggagaacaaatcgtggaagatggaattggaatggctcacacagaacatgtaccagggactgcagagaatgcccggtcatgtattcgagcttatttttatgatctacatgaaactctgtgtcgtcaagaagaaatggctctaagtgttgttgatgctcatgttcgtgaaaaattgatttggctcaggcagcaacaagaagatatgactattttgttgtcagaggtttctgcagcctgcctccactgtgaaaagactttgcagcaggatgattgtagagttgtcttggcaaaacaggaaattacaaggttactggaaacattgcagaaacagcagcagcagtttacagaagttgcagatcacattcagttggatgccagcatccctgtcacttttacaaaggataatcgagttcacattggaccaaaaatggaaattcgggtcgttacgttaggattggatggtgctggaaaaactactatcttgtttaagttaaaacaggatgaattcatgcagcccattccaacaattggttttaacgtggaaactgtagaatataaaaatctaaaattcactatttgggatgtaggtggaaaacacaaattaagaccattgtggaaacattattacctcaatactcaagctgttgtgtttgttgtagatagcagtcatagagacagaattagtgaagcacacagcgaacttgcaaagttgttaacggaaaaagaactccgagatgctctgctcctgatttttgctaacaaacaggatgttgctggagcactgtcagtagaagaaatcactgaactactcagtctccataaattatgctgtggccgtagctggtatattcagggctgtgatgctcgaagtggtatgggactgtatgaagggttggactggctctcacggcaacttgtagctgctggagtattggatgttgcttga

SEQ ID NO: 218 - DNA, 3495 bp, Homo sapiens
atggcccaacaagcaaatgtcggggagcttcttgccatgctggactcccccatgctgggtgtgcgggacgacgtgacagctgtctttaaagagaacctcaattctgaccgtggccctatgcttgtaaacaccttggtggattattacctggaaaccagctctcagccggcattgcacatcctgaccaccttgcaagagccacatgacaagcacctcttggacaggattaacgaatatgtgggcaaagccgccactcgtttatccatcctctcgttactgggtcatgtcataagactgcagccatcttggaagcataagctctctcaagcacctcttttgccttctttactaaaatgtctcaagatggacactgacgtcgttgtcctcacaacaggcgtcttggtgttgataaccatgctaccaatgattccacagtctgggaaacagcatcttcttgatttctttgacatttttggccgtctgtcatcatggtgcctgaagaaaccaggccacgtggcggaagtctatctcgtccatctccatgccagtgtgtacgcactctttcatcgcctttatggaatgtacccttgcaacttcgtctcctttttgcgttctcattacagtatgaaagaaaacctggagacttttgaagaagtggtcaagccaatgatggagcatgtgcgaattcatccggaattagtgactggatccaaggaccatgaactggaccctcgaaggtggaagagattagaaactcatgatgttgtgatcgagtgtgccaaaatctctctggatcccacagaagcctcatatgaagatggctattctgtgtctcaccaaatctcagcccgctttcctcatcgttcagccgatgtcaccaccagcccttatgctgacacacagaatagctatgggtgtgctacttctaccccttactccacgtctcggctgatgttgttaaatatgccagggcagctacctcagactctgagttccccatcgacacggctgataactgaaccaccacaagctactctttggagcccatctatggtttgtggtatgaccactcctccaacttctcctggaaatgtcccacctgatctgtcacacccttacagtaaagtctttggtacaactgcaggtggaaaaggaactcctctgggaaccccagcaacctctcctcctccagccccactctgtcattcggatgactacgtgcacatttcactcccccaggccacagtcacaccccccaggaaggaagagagaatggattctgcaagaccatgtctacacagacaacaccatcttctgaatgacagaggatcagaagagccacctggcagcaaaggttctgtcactctaagtgatcttccagggtttttaggtgatctggcctctgaagaagatagtattgaaaaagataaagaagaagctgcaatatctagagaactttctgagatcaccacagcagaggcagagcctgtggttcctcgaggaggctttgactctcccttttaccgagacagtctcccaggttctcagcggaagacccactcggcagcctccagttctcagggcgccagcgtgaaccctgagcctttacactcctccctggacaagcttgggcctgacacaccaaagcaagcctttactcccatagacctgccctgcggcagtgctgatgaaagccctgcgggagacagggaatgccagacttctttggagaccagtatcttcactcccagtccttgtaaaattccacctccgacgagagtgggctttggaagcgggcagcctcccccgtatgatcatctttttgaggtggcattgccaaagacagcccatcattttgtcatcaggaagactgaggagctgttaaagaaagcaaaaggaaacacagaggaagatggtgtgccctctacctccccaatggaagtgctggacagactgatacagcagggagcagacgcgcacagcaaggagctgaacaagttgcctttacccagcaagtctgtcgactggacccactttggaggctctcctccttcagatgagatccgcaccctccgagaccagttgcttttactgcacaaccagttactctatgagcgttttaagaggcagcagcatgccctccggaacaggcggctcctccgcaaggtgatcaaagcagcagctctggaggaacataatgctgccatgaaagatcagttgaagttacaagagaaggacatccagatgtggaaggttagtctgcagaaagaacaagctagatacaatcagctccaggagcagcgtgacactatggtaaccaagctccacagccagatcagacagctgcagcatgaccgagaggaattctacaaccagagccaggaattacagacgaagctggaggactgcaggaacatgattgcggagctgcggatagaactgaagaaggccaacaacaaggtgtgtcacactgagctgctgctcagtcaggtttcccaaaagctctcaaacagtgagtcggtccagcagcagatggagttcttgaacaggcagctgttggttcttggggaggtcaacgagctctatttggaacaactgcagaacaagcactcagataccacaaaggaagtagaaatgatgaaagccgcctatcggaaagagctagaaaaaaacagaagccatgttctccagcagactcagaggcttgatacctcccaaaaacggattttggaactggaatctcacctggccaagaaagaccaccttcttttggaacagaagaaatatctagaggatgtcaaactccaggcaagaggacagctgcaggccgcagagagcaggtatgaggctcagaaaaggataacccaggtgtttgaattggagatcttagatttatatggcaggttggagaaagatggcctcctgaaaaaacttgaagaagaaaaagcagaagcagctgaagcagcagaagaaaggcttgactgttgtaatgacgggtgctcagattccatggtagggcacaatgaagaggcatctggccacaacggtgagaccaagacccccaggcccagcagcgcccggggcagtagtggaagcagaggtggtggaggcagcagcagcagcagcagcgagctttctaccccagagaaacccccacaccagagggcaggcccattcagcagtcggtgggagacgactatgggagaagcgtctgccagcatccccaccactgtgggctcacttcccagttcaaaaagcttcctgggtatgaaggctcgagagttatttcgtaataagagcgagagccagtgtgatgaggacggcatgaccagtagcctttctgagagcctaaagacagaactgggcaaagacttgggtgtggaagccaagattcccctgaacctagatggccctcacccgtctcccccgaccccggacagtgttggacagctacatatcatggactacaatgagactcatcatgaacacagctaa

SEQ ID NO: 219 - DNA, 1320 bp, Homo sapiens
atggtgccatccagggaagctctgctgggaccaggcacaactgccattaggtgccccaagaaattacagaaccaaaattacaagggccatggattgtcaaagggaaaagagcgagagcagagagcatcgatccggttcaagaccaccctcatgaacacactcatggacgtccttcgccacaggccaggatgggtggaagtgaaggacgaaggggagtgggatttctactggtgtgacgtcagctggctccgggagaacttcgaccacacctacatggatgaacatgtgcggatcagtcacttccggaaccactatgagctgacccggaagaactacatggtgaagaacctgaagcggttccggaagcagctggagcgtgaggcaggaaagctggaggcagccaagtgtgacttcttccccaaaacctttgagatgccttgcgagtaccacctgtttgtagaggagtttcgcaaaaacccaggaatcacctggatcatgaagcctgtagcccggtctcaagggaaaggcatcttcctcttccgtaggctgaaggacatcgtggactggaggaaggacacaagaagctctgacgaccagaaagatgatattcccgtggagaactatgtggctcagcgttacattgaaaatccttacctgataggaggccgcaagtttgacctgcgtgtctatgtgctggtgatgtcggtgtttgctgaatgcctgctgtggtctgggcacaggagacaggatgttcacctcaccaacgtggctgtgcaaaaaacatctcccgactaccacccaaagaagggctgcaagtggacgctgcagcgcttccggcagtacctggcgtccaaacacgggcccgaggcagtggagacactcttcagggacatcgacaacatctttgtcaaaagcctgcagagtgtgcagaaggtgatcatcagtgacaagcactgcttcgagctgtacggctatgacatcctcatcgaccaggacctcaagccgtggctcctggaggtcaatgcgtccccatcactgacagccagcagccaggaagactatgagctcaagacctgcctcctggaagacaccctgcatgttgtggacatggaagcgaggctcacgggaagggagaagcgagtcgggggctttgacctcatgtggaatgatggccctgttagcagagaggagggggctcctgacctgtcgggaatgggaaactttgtgaccaacacacatctcggctgcgtcaacgatcggaagaaacaactgaggcagctcttctgctcccttcaagttcagaagaaagcttccagttga

SEQ ID NO: 220 - DNA, 327 bp, Homo sapiens
atggtacagattattaaagacacgaatgaatttaaaacatttttgacagctgccggacacaaactcgcagtggttcaattttcttcgaaacggtgtggtccctgcaaaaggatgtttcctgttttccatgagctggctgaaacttgtcacatcaaaacaatacccacatttcagatgttcaagaaaagccagaagggctccatctccaggcctacaccaaccagtgaactccatccccatcagaaatggacccttgactccagtcaagccaatccaagtcaaaccagagctaatttcaggactttgcttaagcagctaggtaaataa

SEQ ID NO: 221 - DNA, 504 bp, Homo sapiens
atgcaggaacactatgatgagttttttgaggaggtttttacagaaatggaggagaagtatggggaagtagaggagatgaacgtctgtgacaacctgggagaccacctggtggggaacgtgtacgtcaagtttcgccgtgaggaagatgcggaaaaggctgtgattgacttgaataaccgttggtttaatggacagccgatccacgccgagctgtcacccgtgacggacttcagagaagcctgctgccgtcagtatgagatgggagaatgcacacgaggcggcttctgcaacttcatgcatttgaagcccatttccagagagctgcggcgggagctgtatggccgccgtcgcaagaagcatagatcaagatcccgatcccgggagcgtcgttctcggtctagagaccgtggtcgtggcggtggcggtggcggtggtggaggtggcggcggacgggagcgtgacaggaggcggtcgagagatcgtgaaagatctgggcgattctga

SEQ ID NO: 222 - DNA, 642 bp, Homo sapiens
atgccccggagggcggagaactgggacgaggccgaggtaggcgcggaggaggcaggcgtcgaagagtacggccctgaagaagacggcggggaggagtcgggcgccgaggagtccggcccggaagagtccggcccggaggaactgggcgccgaggaggagatggaggccgggcggccgcggcccgtgctgcgctcggtgaactcgcgcgagccctcccaggtcatcttctgcaatcgcagtccgcgcgtcgtgctgcccgtatggctcaacttcgacggcgagccgcagccctacccaacgctgccgcctggcacgggccgccgcatccacagctaccgaggtcacctttggctcttcagagatgcagggacacacgatgggcttctggttaaccaaactgaattatttgtgccatctctcaatgttgacggacagcctatttttgccaatatcacactgccagtgtatactctgaaagagcgatgcctccaggttgtccggagcctagtcaagcctgagaattacaggagactggacatcgtcaggtcgctctacgaagatctggaagaccacccaaatgtgcagaaagacctggagcggctgacacaggagcgcattgcacatcaacggatgggagattga

SEQ ID NO: 223 - DNA, 1500 bp, Homo sapiens
atgcctttagtgaagaggaacattgagccccggcacttgtgccggggagctctgcctgaagggattaccagcgaacttgaatgtgtaaccaatagtactcttgccgctatcatacgccagctgagcagtctgagcaaacatgctgaagacatatttggtgagttgtttaatgaggctaacaacttctacatcagagcaaattctcttcaagacagaattgatcgccttgctgtcaaagtcacccagctggattcaacagtggaagaggtctcactacaggatatcaacatgaaaaaagctttcaaaagttccacagtccaagaccagcaagtggtttcaaagaacagcattcctaatcctgttgctgatatttacaaccagagtgataagccaccgcctctgaacatcctgacaccatacagagatgacaagaaggatgggctgaagttctatactgatccttcctatttctttgacctctggaaagaaaaaatgctacaggacacagaagacaaaaggaaagagaaaaggcgtcaaaagagagagaaacacaagctgaaccctaacagaaaccagcaagtaaatgtgagaaaagtcagaacaagaaaagaagagtgggagagaaggaaaatgggcattgagtttatgagtgacgcaaagaaactggagcaggcagggagcgccaaagaggacagagtgcccagcgggtcacatgcatcggacgttacggattactcttacccggctactcccaaccattctctgcacccccagcctgtgaccccttcctatgcagctggtgacgtgccaccacacgggcctgcaagccaggctgcggagcatgagtaccggcccccatctgcctcggcgaggcacatggccctcaacagacctcagcagccgccccccccgcctccccctcaggccccagaggggtcccaggcctctgcaccgatggctccagcagactacgggatgctcccagcgcagataattgagtattacaacccatccggaccacctcctccgccacctcctcctgtgattccctcagcacaaactgccttcgtcagccctctccagatgcccatgcagcccccgttccctgcatcagccagctccacgcacgcagctcctcctcacccaccctccaccgggctcctggtcacagccccgccacccccgggcccaccacctcccccgccaggccctcctggtcccgggtcttctctttcgtcctccccaatgcatggccccccagtagctgaggcgaagcggcaagagcctgcacagccaccaatcagtgatgctcgaagcgacctcctcgctgctattcgaatgggaattcaactgaaaaaggtgcaggagcagcgggagcaggaggccaagcgggagccagtggggaatgacgtggccacgatcctgtcccggcgcattgccgtggagtacagcgactctgacgacgactcagagttcgacgagaacgactggtccgactga

SEQ ID NO: 224 - DNA, 1554 bp, Homo sapiens
ctgcaggacccggcttccacgtgtgtcccggagccggcgtctcagcacacgctccgctccgggcctgggtgcctacagcagccagagcagcagggagtccgggacccgggcggcatctgggccaagttaggcgccgccgaggccagcgctgaacgtctccagggccggaggagccgcggggcgtccgggtctgagccgcagcaaatgggctccgacgtgcgggacctgaacgcgctgctgcccgccgtcccctccctgggtggcggcggcggctgtgccctgcctgtgagcggcgcggcgcagtgggcgccggtgctggactttgcgcccccgggcgcttcggcttacgggtcgttgggcggccccgcgccgccaccggctccgccgccacccccgccgccgccgcctcactccttcatcaaacaggagccgagctggggcggcgcggagccgcacgaggagcagtgcctgagcgccttcactgtccacttttccggccagttcactggcacagccggagcctgtcgctacgggcccttcggtcctcctccgcccagccaggcgtcatccggccaggccaggatgtttcctaacgcgccctacctgcccagctgcctcgagagccagcccgctattcgcaatcagggttacagcacggtcaccttcgacgggacgcccagctacggtcacacgccctcgcaccatgcggcgcagttccccaaccactcattcaagcatgaggatcccatgggccagcagggctcgctgggtgagcagcagtactcggtgccgcccccggtctatggctgccacacccccaccgacagctgcaccggcagccaggctttgctgctgaggacgccctacagcagtgacaatttataccaaatgacatcccagcttgaatgcatgacctggaatcagatgaacttaggagccaccttaaagggagttgctgctgggagctccagctcagtgaaatggacagaagggcagagcaaccacagcacagggtacgagagcgataaccacacaacgcccatcctctgcggagcccaatacagaatacacacgcacggtgtcttcagaggcattcaggatgtgcgacgtgtgcctggagtagccccgactcttgtacggtcggcatctgagaccagtgagaaacgccccttcatgtgtgcttacccaggctgcaataagagatattttaagctgtcccacttacagatgcacagcaggaagcacactggtgagaaaccataccagtgtgacttcaaggactgtgaacgaaggttttctcgttcagaccagctcaaaagacaccaaaggagacatacaggtgtgaaaccattccagtgtaaaacttgtcagcgaaagttctcccggtccgaccacctgaagacccacaccaggactcatacaggtaaaacaagtgaaaagcccttcagctgtcggtggccaagttgtcagaaaaagtttgcccggtcagatgaattagtccgccatcacaacatgcatcagagaaacatgaccaaactccagctggcgctttga

SEQ ID NO: 225 - DNA, 10650 bp, Homo sapiens
atgttcccaatgcagaagggctccctcaacctcctgaggcagaaatgggaatcttgtgattatcagagaagtgagtgtcatcccagggacagccattgtacaattttccagcctcaggaaagcaaattgcttgcgcctgaaggagaggtagtatcagcacctcaatctttggatcccacaagtctgccctacagtacaggggaagagatgtggagttcgaagccggaagagaaggattctgtggacaagagtaacaacaccagggaatatggtcggccagaagtgctgaaggaggattccctgagcagtcggcgcaggattgaacgcttttccattgcccttgatgagctgaggagtgtgtttgaggctcctaagagtggaaacaaaccagctgagtacggtggaaaggaagtggaaattgagcgaagtttgtgctcgccagcttttaagagtcaccctgggagccagctggaggattctgtgaaagattcagacaagaaaggcaaggaaacatcttttgacaagatgtcacctgaaagtggtcacagccgcatctttgaagcgactgctggccctaataagcctgagagtggatttgcagaagacagtgctgctcggggcgagggtgtgtcagacctccacgaagtggtctccctgaaggagcggatggcgaggtaccaggcagctgtttccaggggtgactgccgcagcttctctgctaatatgatggaagaatcagaaatgtgcgcagtgcctggtggtttggccaaggtgaagaaacaatttgaggacgaaattacttcttcccgtaatacctttgctcaataccaatatcaacatcagaacagatctgagcaggaggcaattcatagcagccaggttggcacttcaagaagcagccaggaaatggcaagaaatgaacaagaagggtccaaagtacagaaaattgatgttcatggaacagaaatggtctctcatcttgaaaagcacaccgaggaagtaaaccaagcatctcagtttcatcaatatgttcaagaaactgtcattgatacacctgaggatgaagagattccaaaggtttcgactaagttgttaaaagagcagtttgaaaagtctgcccaggaaaagatcctttattctgacaaagagatgacaaccccagccaagcagattaagactgaaagtgaatatgaagagactttcaagccatcatcagttgtgagtacctcttccacttcttgcgtttcaaccagccagaggaaggaaacatcaactacaagatatagtgatcacagtgtcacttcctcaactctggcacaaattaatgctacttcttcaggaatgacagaagaatttcctcctcccccacctgacgtacttcaaacttcagtagatgtgacagcattttcccagtcccctgaactgcccagtcctcctagaagactaccagtccccaaagatgtatattccaagcaaagaaatttgtatgaattaaaccgtttatataaacacatccatcctgagttaagaaaaaacttagaaaaagattatatcagtgaagtttctgagattgtttctagtcaaatgaactcagggagttcagtctcagcagatgtgcaacaagcccggtatgtttttgaaaacacaaatgacagttctcaaaaagatctgaactcagaaagagaatacttggaatgggatgaaattctgaagggagaggtgcagtccattagatggatctttgagaatcaaccattggattccatcaacaatggctctcctgatgaaggtgatatttccaggggcattgctgatcaagaaatcattgctggtggtgatgtgaaatataccacatggatgtttgaaacccaacccatcgacacacttggggcttattcttctgacactgtagaaaatgcagagaaaattcctgagctagccagaggagatgtctgcacagctcggtggatgtttgaaacaaggccattggactcaatgaataaaatgcatcaaagtcaagaagaatcagcggtaactatcagtaaggacataactgggggggatgtcaagactgtgagatacatgtttgaaactcaacatctagatcaacttggacagcttcattcagtggatgaggttcatttactgcagcttaggtctgagctcaaagaaattaagggaaatgttaaaagaagtataaaatgtttcgaaactcaaccattatatgttattagagatggttcgggccaaatgctggaaattaaaactgttcacagagaagacgttgaaaagggagatgtaagaacagcacggtggatgtttgaaacacagccgttggacacaattaacaaagatatcacagaaattaaagttgtccgaggaatatccatggaagaaaatgtcaaaggtggggtgagtaaggcaaagtggttatttgaaacccaacctttggagaaaatcaaagagtcagaagaggtcatcattgaaaaggaaaaaataataggtacagatgtctccagaaagtgttggatgtttgaaacccagccattagacattctaaaagaagttcctgatgcagattctctacaacgtgaggagataataggtggtgatgtacaaactactaagcatctatttgaaacacttccaattgaagcattaaaagacagtcctgatataggaaagcttcaaaaaatcactgcctctgaagaagaaaaaggggatgttaggcatcaaaaatggatttttgaaacccaacctctggaagacattagaaaagataaaaaggagtacacacgaacagtgaaacttgaagaagttgacagaggagatgtgaagaattacacacatatctttgaatcaaacaatttaattaaatttgatgcatcacataaaatagaggtggaaggagttacaagaggtgctgtagagttaaataaatctctcttcgagacaacaccactgtatgccattcaagatccccttggaaaatatcatcaagtaaagacagtccagcaagaagaaatcgtaagaggtgatgtaagaagctgtaggtggctttttgaaacaaggcccattgaccagtttgatgaaagcattcataaatttcaaataattagaggaatatctgctcaagaaatacagactggaaatgtgaaatctgccaaatggttgtttgaaacccaacctcttgattcaattaaatattttagtgatgtggaagaaacagaaagtaaaactgaacaaactagagatattgttaaaggggatgtcaaaacctgtaaatggctttttgagacccagccaatggagtctctttatgaaaaagtttcgttaatgaccagcagtgaagaaattcataagggagatgtcaaaacttgtacttggctctttgaaactcagccacttgataccataaaagatgactctgaaacagcagtcaaattgcaaactgtaaaacaggaggagatccaaggtggggatgttcgtacagcatgttttctttttgagacagaaaatttggacagcatacaaggagaagaagtgaaggaaatcaagcctgttgaaatggatatacaagctggagatgtttccagcatgaggtataaatttgaaaatcagtccttagattctataagttctagttcagaggaagttttgaaaaagatcaaaaccttaaaaactgaagatattcagaaaggcaatgttttaaattgtaggtggctttttgaaaaccaaccaattgataagataaaagaaagccaagaaggtgatgaatgtgttaagacggtgacagacatacaaggtggggatgtaagaaaggggtgctttatttttgagactttttctttagatgagattaaagaagaatctgactatatcagcaccaagaaaacaattactgaagaagtaatacagggtgatgtaaaaagctacagaatgctctttgaaacccagccactctatgcaattcaagaccgagaagggtcctatcatgaagtgaccacagttaaaaaagaagaggtaattcatggagatgtgcgaggaacaaggtggctttttgaaacaaagccattagactctattaataaatcagaaactgtgtatgttattaaatctgtcacacaagaagacattcagaagggagatgttagttctgtcagatacagatttgaaactcagccactggatcagatttctgaagaatcacataatattatgcccagtattgaccatatacaaggtggcaatgtaaagacaagtagacaattctttgagtctgaaaattttgataagaataactatatacgaacagtaagtgtcaatgaaatacaaaagggcaatgttaaaacatctacttggctatttgaaacccacactatggatgaactgagaggagaagggttagaatatgaaaatatcaagacagtcactcaggaagatgtgcagaaaggtgatgttaagcaggctgtgtggctttttgaaaatcgaactttcgattctattatggaagcacataaaggtatcacaaaaatgaccaaggaagaaatccctccttctgatgtcaaaacaaccacatggctctttgaaacaacaccacttcatgaatttaatgaaactagagtagaaaagatagaaattattggcaagagcattaaagaaaccttagaagatctctactctcaaaaagttatccaggctcctggaatcatcattgaagctgatgaaataggggatgttcgaatggcaaaatacaagctaatgaaccaagcatctcctgagatacagaaagaagaaattatcagggctgatctcagaaatataatggtgaacctactttccaaaagggactgtactgaaagagagattttgattagtgaagaagagaagggaaatgttaatttgactaaaactcaattattaaacagatcaactgaatttcatgctgaaaaagaagagatagtgaaaggtgatgtacaacaagcaataaaaaacctgttctctgaggaaagatctgtaaagaaaggcatcttaattcaggaagatgaaaaaggagatattaacatgactatctattgtcttcttcatgaaaatgatggtgacacaattgagcgtgaagaagtaataggtggtgatgtcaaacgtaccattcataatttattgtcttccacatcaaacaataaaatatctgaaagggctaaaattgatgcctctgagagaggaaatgttcagtttttcacaacctgcatagaagctggagctttggattatctgaaacaactccacacagagtcaaatgaaacactgacagctaagaaacaagaaggagagaaagaaatcattggtggtgatgttgaaggtacaaaactgttactgaagaaaaggcagtctctggttgaacgtactgttagtgaaactgacatcatccctggagatgtgcataacacagttaaggtttttatgaccgagcctcagagtacatttggtaagatacccaaagaagagattataaaaggtgatttgacatcaaccctaaattccctcagccaggctgtaaatcagaaaacagtgacgaaaacagaagaaattataaaaggtaacatgctagccacactcaagtcacttaaagaatcaagccatcgatggaaagaatctaaacagcctgatgccatccctggtgatattgaaaaagctattgaatgccttgaaaaagctacaaatacaaagacagaaattctgaaaaaggagcttctcaaagatgacctggaaacatcactaaggtctttgaaagaagcacaaagaagtttcaaagaggtacataaagaaggtgtaataaaaaaagatgctaaagctgtgatggcaggatcctcgggagagcagaaaacagatattcatcaggttgctgtccagaggaacaaaaatagtcttcttcagccaaagccaggtccatttgagccagcggccaagtggcaagggggagcagatactctcagtcaaactatggggaaatcttgccatggcaatttagtagaagaaagaactgaggttaatcttccaaaagcccccaaaggcactgtaaagattgtcatagatcgtgaacaaaacaatgatgctctggagaaaagccttagaagactatctaattcacaccataaatctaatgttttggaatcaggagacaaaacgggtgtctggactgatactacaggagaacagcatcttagagatgaatatatgagcagacaattaacttcaactgtgtcagttaagaataatctaacaactaaagaatcagacagggcagtgagagagctgaagaaggatgatgtctttaattccatccaatctgctggtaaaaccgttggaaagcaacagacatatgaactgagaaatgaccaccagaaaatggagggttttcatataaagagtcctaaaaagaccaaaaatattaaaatattaactgatacacaaagctccaagcccagtcccacccagcatccagtcagcatgccagttggaggaacttacgacctttcaggggactttcagaagcaaactttgttaaagcaagaaacaaaatattctaataaggatataaagaaaaagaatataaaccttcaaccaatgtggcagcttttgcctgtagagcaagacacatccaatgtaacagaaatgaaagtctctgaaaaaagtcacaatacatttaaggcaaccaacaaaaagcgggagactgatgttcacttgaaaagccaggactttctaatgaaaacaaatacttccacaggcttaaaaatggcaatggaaaggtccttgaatccaatcaactttaaccctgagaataatgtaaaagaaagtgagtgcccccttccacctccatctccacctcctccaccaccttctaatgcatcatctgaaattgaatttcctcttcctcctccacctcctttgatgatgtttcctgaaaaaaatgggtttcttccctcactgtccacagagaagataaaggctgaatttgaaagttttccaggcctccctcttcctccacctccagtagatgagaaatctgaaagagaaagttcatcgatgtttctgccgcctcctcctcctccaactccatctcaaaagccagcacatctcctttcctcctctgctccggaaaagcacagtggagacttcatgcaacaatattcccaaaaagaagcctcgaactctcagaattctcaggctaaaatcataacaggaaaaaccggtgtgttgccacctcccacattgcccaaacccaaacttcccaagcatataaaagataataagaacgatttttcccccaaagttgaactggcaacctccctgtcagatatggaatgtaaaattactacctcaaaggatcagaaaaaagtaatggtgatgaccagcagtgaacacacggagacaaagcagaacgttattagtaagagtcttgatgaaagaaaacaattatctattgactctgcaaactgtctctcacacacagttccaggaacttcagcacccaggaaaaaacagattgcgcctcttataaaatctcattcatttccagagagttcaggacaacaaaatccaaaaccttatatgagaaaatttaagacacctttaatgattgctgaagaaaaatatagacaacaaaaagaagaaattgaaaaacagaaacaggagagttcttactacaacattgttaaaactcaaagccaaaatcaacacataacagaggtggaaaaggaaatgccattacaaaaaaccaatgaggaggtttccctatctggaattgattcagaatgcactgtggttcaacccagcccaggctctcaaagtaatgctcggatactaggagtgtgttctgataaccaactctccacaacatcgccagaaacagtcgctgccaagaggctccaccatgttttagcagcttcagaagacaaagataagatgaaaaaggaagttttacaaagctcaagggacattatgcaatccaaatcagcttgcgaaattaaacaaagtcaccaagaatgtagtacccaacaaacacaacagaagaagtatttggagcagttgcacttgccccaaagcaaaccaatttccccaaatttcaaagttaaaaccatcaaacttccaactctagatcatacattaaatgaaacagaccacagctatgaaagtcataaacagcaatctgagattgatgttcaaacctttaccaaaaaacaatatctgaaaaccaagaaaactgaagcaagcactgaatgtagtcataagcaatctctggctgaaagacattatcagttacctaagaaggagaaaagagtgacagtacaattgcctacagaatccatacagaagaaccaggaagataagctcaagatggttcccaggaagcaaagagaatttagcggatctgacagagggaaacttccaggaagtgaagaaaaaaatcagggaccatcaatgattggtcgaaaagaagagagattaataactgaaagaaaacacgaacatctgaagaataaatcagcaccaaaggtcgtcaagcaaaaggttatcgatgcacatcttgattcacagactcagaattttcagcaaacacaaatacagaccgctgaaagtaaagctgaacataaaaaattgccccagccatataatagtctgcaggaagaaaaatgtctcgaagtcaagggcatacaagagaaacaagtcttctctaatactaaagattcaaagcaagagattacacagaacaaatctttcttttcctctgtgaaagaatcccagcgggatgatggaaaaggtgccttaaatatagtggaattcttgagaaaacgtgaagaactgcaacagattttgtcgagagtgaaacagtttgaagcagagccaaataaaagtggccttaaaacatttcagacactattaaatactatcccaggatggctgataagtgaagataagagagaatatgcagttcacattgccatggagaataatttagaaaaagtaaaagaagaaataacacatattaaaactcaagcggaagatatgcttgtgtcctatgaaaatataattcagacagccatgatgtcctccaaaacaggaaaaccgggaaataaacccactagtcttgatgaaacatcatccaaagtatctaatgttcatgtcagcaataataaaaatagtgaacagaaagaaaataaaattgccaaagagaaaacagtacagcaccaagtagcagctcatcatgaagcaactgttcgtagtcacgtgaaaacccatcaggaaattaaacttgatgatagcaacattcctcctccctctttaaaaacacgcccaccgtcaccaacttttatcacaatagaatctactgcccgacgaacagaaaaccctactaagaacgagctttctcagtcccctaaaaaggacagttatgttgaacccccaccaagaaggcccatgtcgcaaaaatctgaaattcacagagcaaacacttccccttctccacccaggagtcgctctgaacaacttgtcagactcaaagacaccactgcaaagttatccaaaggggccatcccatgtccagcagcaaccccggttccaattgtagagaagaggtctgaaatcatcatgtctcctgcaacacttcgtcgtcaaattaagatagaaactcgtggtagggactctccacctacaatcacaataccagtaaatataaatcatgctgctagtggttccttcagagaatctgtggacgctcaagaggaaatcaggaaagtggagaagagagctacttatgttcataaagatggactaaattccactgatcacatggtgcccgacactgaaagttatgatgcagttgaaatcatccgcaaggttgcagtgcctcctcgcctgtcagagcacacacagagatatgaagcggccaaccgaactgttcaaatggctgaaaatttcgtgaatgaccctgaaaatgaaataaacagatggttcagggaatttgagcatggcccagtttctgaagcaaagtcaaatagaagagtttatgcaaagggagaaacaaaccataacatacaacaagaaagtcgtacattttgtaaggaggaatttggattaacatctttaggaaacacgagttttacagacttttcttgcaaacatcctagagaactgcgagaaaagattcctgttaagcagcccaggatctgctctgaaaccaggtctctaagtgaacatttctcaggcatggatgcatttgagagtcaaattgttgagtcgaagatgaaaacctcttcatcacatagctcagaagctggcaaatctggctgtgacttcaagcatgccccaccaacctatgaggatgtcattgctggacatattttagatatctctgattcacctaaagaagtaagaaaaaattttcaaaagacgtggcaagagagtggaagagtttttaaaggcctgggatatgcaaccgcagatgcttctgcaactgagatgagaaccaccttccaagaggaatctgcatttataagtgaagctgctgctccaagacaaggaaatatgtatactttgtcaaaagacagtttatccaatggagtgcctagtggcagacaagcagaattttcataa

SEQ ID NO: 226 - DNA, 3216 bp, Homo sapiens
atgccagcaattatgacaatgttagcagaccatgcagctcgtcagctgcttgatttcagccaaaaactggatatcaacttattagataatgtggtgaattgcttataccatggagaaggagcccagcaaagaatggctcaagaagtactgacacatttaaaggagcatcctgatgcttggacaagagtcgacacaattttggaattttctcagaatatgaatacgaaatactatggactacaaattttggaaaatgtgataaaaacaaggtggaagattcttccaaggaaccagtgcgaaggaataaaaaaatacgttgttggcctcattatcaagacgtcatctgacccaacttgtgtagagaaagaaaaggtgtatatcggaaaattaaatatgatccttgttcagatactgaaacaagaatggcccaaacattggccaacttttatcagtgatattgttggagcaagtaggaccagcgaaagtctctgtcaaaataatatggtgattcttaaactcttgagtgaagaagtatttgatttctctagtggacagataacccaagtcaaatctaagcatttaaaagacagcatgtgcaatgaattctcacagatatttcaactgtgtcagtttgtaatggaaaattctcaaaatgctccacttgtacatgcaaccttggaaacattgctcagatttctgaactggattcccctgggatatatttttgagaccaaattaatcagcacattgatttataagttcctgaatgttccaatgtttcgaaatgtctctctgaagtgcctcactgagattgctggtgtgagtgtaagccaatatgaagaacaatttgtaacactatttactctgacaatgatgcaactaaagcagatgcttcctttaaataccaatattcgacttgcgtactcaaatggaaaagatgatgaacagaacttcattcaaaatctcagtttgtttctctgcacctttcttaaggaacatgatcaacttatagaaaaaagattaaatctcagggaaactcttatggaggcccttcattatatgttgttggtatctgaagtagaagaaactgaaatctttaaaatttgtcttgaatactggaatcatttggctgctgaactctatagagagagtccattctctacatctgcctctccgttgctttctggaagtcaacattttgatgttcctcccaggagacagctatatttgcccatgttattcaaggtccgtttattaatggttagtcgaatggctaaaccagaggaagtattggttgtagagaatgatcaaggagaagttgtgagagaattcatgaaggatacagattccataaatttgtataagaatatgagggaaacattggtttatcttactcatctggattatgtagatacagaaagaataatgacagagaagcttcacaatcaagtgaatggtacagagtggtcatggaaaaatttgaatacattgtgttgggcaataggctccattagtggagcaatgcatgaagaggacgaaaaacgatttcttgttactgttataaaggatctattaggattatgtgaacagaaaagaggcaaagataataaagctattattgcatcaaatatcatgtacatagtaggtcaatacccacgttttttgagagctcactggaaatttctgaagactgtagttaacaagctgttcgaattcatgcatgagacccatgatggagtccaggatatggcttgtgatactttcattaaaatagcccaaaaatgccgcaggcatttcgttcaggttcaggttggagaagtgatgccatttattgatgaaattttgaacaacattaacactattatttgtgatcttcagcctcaacaggttcatacgttttatgaagctgtggggtacatgattggtgcacaaacagatcaaacagtacaagaacacttgatagaaaagtacatgttactccctaatcaagtgtgggatagtataatccagcaggcaaccaaaaatgtggatatactgaaagatcctgaaacagtcaagcagcttggtagcattttgaaaacaaatgtgagagcctgcaaagctgttggacacccctttgtaattcagcttggaagaatttatttagatatgcttaatgtatacaagtgcctcagtgaaaatatttctgcagctatccaagctaatggtgaaatggttacaaagcaaccattgattagaagtatgcgaactgtaaaaagggaaactttaaagttaatatctggttgggtgagccgatccaatgatccacagatggtcgctgaaaattttgttccccctctgttggatgcagttctcattgattatcagagaaatgtcccagctgctagagaaccagaagtgcttagtactatggccataattgtcaacaagttagggggacatataacagctgaaatacctcaaatatttgatgctgtttttgaatgcacattgaatatgataaataaggactttgaagaatatcctgaacatagaacgaactttttcttactacttcaggctgtcaattctcattgtttcccagcattccttgctattccacctacacagtttaaacttgttttggattccatcatttgggctttcaaacatactatgaggaatgtcgcagatacgggcttacagatactttttacactcttacaaaatgttgcacaagaagaagctgcagctcagagtttttatcaaacttatttttgtgatattctccagcatatcttttctgttgtgacagacacttcacatactgctggtttaacaatgcatgcatcaattcttgcatatatgtttaatttggttgaagaaggaaaaataagtacatcattaaatcctggaaatccagttaacaaccaaatctttcttcaggaatatgtggctaatctccttaagtcggccttccctcacctacaagatgctcaagtaaagctctttgtgacagggcttttcagcttaaatcaagatattcctgctttcaaggaacatttaagagatttcctagttcaaataaaggaatttgcaggtgaagacacttctgatttgtttttggaagagagagaaatagccctacggcaggctgatgaagagaaacataaacgtcaaatgtctgtccctggcatctttaatccacatgagattccagaagaaatgtgtgattaa

SEQ ID NO: 227 - DNA, 11112 bp, Homo sapiens
atggaaggctgtgactcgcccgtcgtctcggggaaggacaatgggtgcggtatccctcagcaccagcaatggactgaactcaacagcacccacctccctgacaaacccagtagcatggagcagtccacaggcgagagccacgggcccttggacagcctgagggcccccttcaatgagcgcctcgcggagagcaccgcgtcggccgggcccccctccgagcccgccagcaaggaggtcacctgcaacgaatgttcggcctcctttgccagcctccagacctacatggagcaccactgccccagcgcgcgccccccgccacccctgagagaggagagcgccagcgacaccggtgaggagggggacgaggagagtgacgtggagaacctggccggggagatcgtctaccagccggacggctccgcgtacattgtggagagcctgagccagctgacccagggcgggggcgcctgtgggagtggcagtggcagtgggcctctcccctcgcttttcctgaactctctccctggcgcggggggcaagcaaggggacccttcgtgtgctgcacccgtgtacccgcagatcatcaacactttccacatagcctcatccttcgggaaatggtttgagggcccagaccaggctttcccgaatacctcagccctggcggggctcagccccgtcctgcacagcttccgcgtgtttgacgtgcgacacaaaagcaacaaggattacctgaacagcgacggttctgccaaaagctcctgcgtatccaaagatgttcccaacaatgtggacctgtccaaattcgatggctttgtgctctatggcaagaggaagcccatcctgatgtgtttcttgtgcaaactctcctttgggtacgtccgttcgtttgtgacccacgcggtgcatgaccatcgaatgaccctgagcgaagacgagcggaaaattcttagcaataagaacatctccgctatcatccaagggatcggcaaagacaaggaaccccttgtaagttttctggaaccaaaaaacaaaaactttcaacaccctttagtttccacagctaacctcataggccccggacacagtttttatggtaaatttagtggcattcgaatggaaggggaggaagctctcccagcgggctccgccgctggccccgagcagccccaggctggtctcttgacccccagcaccctgttgaaccttggcgggctcaccagctcggtactgaagacccccattacctcagtccccctggggcctctggcttccagtcctaccaaatcctcagagggcaaggactctggggcggcagaaggagagaagcaggaagtgggcgacggggattgcttctctgagaaggtagagccagccgaagaggaggcggaggaggaagaggaggaggaagaggcggaggaggaggaggaagaagaggaggaggaagaagaggaggaggaagacgagggttgcaaaggactctttccaagcgagttggatgaggaactggaggacaggccccatgaggagcctggggccgcagcaggtagtagcagcaaaaaggaccttgctctctcaaaccaaagcatttctaactcccccttaatgcctaacgtgctccagaccctgtcgaggggcacagcttctactagttctaattctgcttcttcctttgttgtctttgatggtgcgaacaggaggaatcgtttaagctttaacagtgagggcgtcagggccaatgtggcagagggcggcaggaggctggacttcgctgacgaaagtgccaataaagacaatgccacagcaccagaaccaaatgaaagcacagagggtgacgatgggggcttcgttccccatcaccagcacgctggctccctctgcgagcttggggttggggagtgcccctcggggagtggcgtggagtgccccaaatgcgacacggtcctgggctcctcccgctcgctgggcggccacatgaccatgatgcattctcgtaactcgtgtaagacactcaagtgccccaagtgcaactggcactataagtaccagcagaccctggaggcacacatgaaggagaagcacccggagccggggggctcctgtgtctactgcaaaagcgggcagccccacccccggctggcacgaggcgagagctacacgtgtggttacaagcctttccgctgcgaggtgtgtaactactccacaactaccaaaggcaacctcagtattcatatgcagtctgacaagcatctcaacaacatgcagaacctgcagaatggagggggggagcaggtcttcagccacactgccggggcggcggcggcggcggtggctgcggcggcggcggcagccaatatcagtagctcctgcggggccccctcgccgaccaaaccaaaaaccaaacccacctggcggtgcgaggtgtgtgattatgagaccaacgtggccaggaacctccgcattcacatgaccagtgagaagcacatgcataacatgatgttactgcaacagaacatgacccagatccaacacaaccgccacctgggcctcggcagcctgccctcacccgccgaggccgagctctaccaatactacctggcccagaacatgaacctgcccaacctgaagatggacagtgctgcctcggacgcccagttcatgatgagcggattccagctggatcccgccgggcccatggccgccatgacgcctgctctagtgggcggtgagatccccctagacatgcggctcgggggcgggcagctggtgtcagaggagctgatgaacctgggcgagagcttcatccagaccaacgacccgtcgctgaagctcttccagtgcgccgtctgcaacaagttcacgacggacaacctggacatgctgggcctgcacatgaacgtggagcgcagcctgtcggaggacgagtggaaggcggtgatgggggactcataccagtgcaagctctgccgctacaacacccagctcaaggccaacttccagctgcactgcaagacagacaagcacgtgcagaagtaccagctggtggcccacatcaaggagggcggcaaggccaacgagtggaggctcaagtgtgtggccatcggcaaccccgtgcacctcaagtgcaacgcctgtgactactacaccaacagcctggagaagctgcggctgcacacggtcaactccaggcacgaggccagcctgaagttgtacaagcacctgcagcagcatgagagtggtgtagaaggtgagagctgctactaccactgcgttctgtgcaactactccaccaaggccaagctcaacctcatccagcatgtgcgctccatgaagcaccagcgaagcgagagcctgcgaaagctgcagcggctgcagaagggccttccagaggaggacgaggacctggggcagatcttcaccatccgcaggtgcccctccacggacccagaagaagccattgaagatgttgaaggacccagtgaaacagctgctgatccagaggagcttgctaaggaccaagagggcggagcatcgtccagccaagcagagaaggagctgacagattctcctgcaacctccaaacgcatctccttcccaggtagctcagagtctcccctctcttcgaagcgaccaaaaacagctgaggagatcaaaccggagcagatgtaccagtgtccctactgcaagtacagtaatgccgatgtcaaccggctccgggtgcatgccatgacgcagcactcggtgcaacccatgcttcgctgccccctgtgccaggacatgctcaacaacaagatccacctccagctgcacctcacccacctccacagcgtggcacctgactgcgtggagaagctcattatgacggtgaccacccctgagatggtgatgccaagcagcatgttcctcccagcagctgttccagatcgagatgggaattccaatttggaagaggcaggaaagcagcctgaaacctcagaggatctgggaaagaacatcttgccatccgcaagcacagagcaaagcggagatttgaaaccatcccctgctgacccaggctctgtgagagaagactcaggcttcatctgctggaagaaggggtgcaaccaggttttcaaaacttctgctgcccttcagacgcattttaatgaagtgcatgccaagaggcctcagctgccggtgtcagatcgccatgtgtacaagtaccgctgtaatcagtgtagcctggccttcaagaccattgaaaagttgcagctccattctcagtaccatgtgatcagagctgccaccatgtgctgtctttgtcagcgcagtttccgaactttccaggctctgaagaagcaccttgagacaagccacctggagctgagtgaggctgacatccaacagctttatggtggcctgctggccaatggggacctcctggcaatgggagaccccactctggcagaggaccataccataattgttgaggaagacaaggaggaagagagtgacttggaagataaacagagcccaacgggcagtgactctgggtcagtacaagaagactcgggctcagagccaaagagagctctgcctttcagaaaaggtcccaattttactatggaaaagttcctagacccttctcgcccttacaagtgtaccgtctgcaaggaatctttcactcaaaagaatatcctgctagtacactacaattctgtctcccacctgcataagttaaagagagcccttcaagaatcagcaaccggtcagccagaacccaccagcagcccagacaacaaaccttttaagtgtaacacttgtaatgtggcctacagccagagttccactctggagatccatatgaggtctgtgttacatcaaaccaaggcccgggcagccaagctggaggctgcaagtggcagcagcaatgggactgggaacagcagcagtatttccttgagctcctccacgccaagtcctgtgagcaccagtggcagtaacacctttaccacctccaatccaagcagtgctggcattgctccaagctctaacttactaagccaagtgcccactgagagtgtagggatgccacccctggggaatcctattggtgccaacattgcttccccttcagagcccaaagaggccaatcggaagaaactggcagatatgattgcatccaggcagcagcaacaacagcagcagcaacagcaacaacaacaacaacaacaacaacaacaagcacaaacgctggcccaggcccaggctcaagttcaagctcacctgcagcaggagctgcagcaacaggctgccctgatccagtctcagctgtttaaccccaccctccttcctcacttccccatgacaactgagaccctgctgcaactacagcagcagcagcacctcctcttccctttctacatccccagtgctgagttccagcttaaccccgaggtgagcttgccagtgaccagtggggcactgacactgactgggacaggcccaggcctgctggaagatctgaaggctcaggttcaggtcccacagcagagccatcagcagatcttgccgcagcagcagcagaaccaactctctatagcccagagtcactctgccctccttcagccaagccagcaccccgaaaagaagaacaaattggtcatcaaagaaaaggaaaaagaaagccagagagagagggacagcgccgaggggggagagggcaacaccggtccgaaggaaacactgccagatgccttgaaggccaaagagaagaaagagttggcaccagggggtggttctgagccttccatgctccctccacgcattgcttcagatgccagagggaacgccaccaaggccctgctggagaactttggctttgagttggtcatccagtataatgagaacaagcagaaggtgcagaaaaagaatgggaagactgaccagggagagaacctggaaaagctcgagtgtgactcctgcggcaagttgttttccaacatcttgattttaaagagtcatcaagagcacgttcatcagaattactttcctttcaaacagctcgagaggtttgccaaacagtacagagaccactacgataaactgtacccactgaggccccagaccccagagccaccaccacctccccctccaccccctccacccccacttccggcagcgccgcctcagccggcgtccacaccagccatccccgcatcagccccacccatcacctcacctacaattgcaccggcccagccatcagtgccgctcacccagctctccatgccgatggagctgcccatcttctcgccgctgatgatgcagacgatgccgctgcagaccttgccggctcagctacccccgcagctgggacctgtggagcctctgcctgcggacctggcccaactctaccagcatcagctcaatccaaccctgctccagcagcagaacaagaggcctcgcaccaggatcacagatgatcagctccgagtcttgcggcaatattttgacattaacaactcccccagtgaagagcaaataaaagagatggcagacaagtccgggttgccccagaaagtgatcaagcactggttcaggaacactctcttcaaagagaggcagcgtaacaaggactccccttacaacttcagtaatcctcctatcaccagcctggaggagctcaagattgactcccggcccccttcgccggaacctccaaagcaggagtactggggaagcaagaggtcttcaagaacaaggtttacggactaccagctgagggtcttacaggacttcttcgatgccaatgcttacccaaaggatgatgaatttgagcaactctctaatttactgaaccttccaacccgagtgatagtggtgtggtttcagaatgcccgacagaaggccaggaagaattatgagaatcagggagagggcaaagatggagagcggcgtgagcttacaaatgatagatacattcgaacaagcaacttgaactaccagtgcaaaaaatgtagcctggtgtttcagcgcatctttgatctcatcaagcaccagaagaagctgtgttacaaggatgaggatgaggaggggcaggacgacagccaaaatgaggattccatggatgccatggaaatcctgacgcctaccagctcatcctgcagtaccccgatgccctcacaggcttacagcgccccagcaccatcagccaataatacagcttcctccgctttcttgcagcttacagcggaggctgaggaactggccaccttcaattcaaaaacagaggcaggcgatgagaaaccaaagctggcggaagctcccagtgcacagccaaaccaaacccaagaaaagcaaggacaaccaaagccagagctgcagcagcaagagcagcccgagcagaagaccaacactccccagcagaagctcccccagctggtgtccctgccttcgttgccacagcctcctccacaagcgccccctccacagtgccccttaccccagtcgagccccagtccttcccagctctcccacctgcccctcaagcccctccacacatcaactcctcaacagctcgcaaacctacctcctcagctaatcccctaccagtgtgaccagtgtaagttggcatttccgtcatttgagcactggcaggagcatcagcagctccacttcctgagcgcgcagaaccagttcatccacccccagtttttggacaggtccctggatatgcctttcatgctctttgatcccagtaacccactcctggccagccagctgctctctggggccatacctcagattccagcaagctcagccacttctccttcaactccaacctccacaatgaacactctcaagaggaagctggaggaaaaggccagtgcaagccctggcgaaaacgacagtgggacaggaggagaagagcctcagagagacaagcgtttgagaacaaccatcacaccggaacaactagaaattctctaccagaagtatctactggattccaatccgactcgaaagatgttggatcacattgcacacgaggtgggcttgaagaaacgtgtggtacaagtctggtttcagaacacccgagctcgggaaaggaaaggacagttccgggctgtaggcccagcgcaggcccacaggagatgccctttttgcagagcgctcttcaaagccaagactgctcttgaggctcatatccggtcccgtcactggcatgaagccaagagagctggctacaacctaactctgtctgcgatgctcttagactgtgatgggggactccagatgaaaggagatatttttgacggaactagcttttcccacctacccccaagcagtagtgatggtcagggtgtccccctctcacctgtgagtaaaaccatggaattgtcacccagaactcttctaagcccttcctccattaaggtggaagggattgaagactttgaaagcccctccatgtcctcagttaatctaaactttgaccaaactaagctggacaacgatgactgttcctctgtcaacacagcaatcacagataccacaactggagacgagggcaacgcagataacgacagtgcaacgggaatagcaactgaaaccaaatcctcttctgcacccaacgaagggttgaccaaagcggccatgatggcaatgtctgagtatgaagatcggttgtcatctggtctggtcagcccggccccgagcttttatagcaaggaatatgacaatgaaggtacagtggactacagtgaaacctcaagccttgcagatccctgctccccgagtcctggtgcgagtggatctgcaggcaaatctggtgacagcggagatcggcctgggcagaaacgttttcgcactcaaatgaccaatctgcagctgaaggtcctcaagtcatgctttaatgactacaggacacccactatgctagaatgtgaggtcctgggcaatgacattggactgccaaagagagtcgttcaggtctggttccagaatgcccgggcaaaagaaaagaagtccaagttaagcatggccaagcattttggtataaaccaaacgagttatgagggacccaaaacagagtgcactttgtgtggcatcaagtacagcgctcggctgtctgtacgtgaccatatcttttcccaacagcatatctccaaagttaaagacaccattggaagccagctggacaaggagaaagaatactttgacccagccaccgtacgtcagttgatggctcaacaagagttggaccggattaaaaaggccaacgaggtccttggactggcagctcagcagcaagggatgtttgacaacacccctcttcaggcccttaaccttcctacagcatatccagcgctccagggcattcctcctgtgttgctcccgggcctcaacagcccctccttgccaggctttactccatccaacacagctttaacgtctcctaagccgaacttgatgggtctgcccagcacaactgttccttcccctggcctccccacttctggattaccaaataaaccgtcctcagcgtcgctgagctccccaaccccagcacaagccacgatggcgatgggccctcagcaacccccccagcagcagcagcagcagcagcaaccacaggtgcagcagcctcccccgccgccagcagcccagccgccacccacaccacagctcccactgcaacagcagcagcaacgcaaggacaaagacagtgagaaagtaaaggagaaggaaaaggcacacaaagggaaaggggaacccctgcctgtccccaagaaggagaaaggagaggcccccacggcaactgcagccacgatctcagccccgctgcccaccatggagtatgcggtagaccctgcacagctgcaggccctgcaggccgcgttgacttcggaccccacagcattgctcacaagccagttccttccttactttgtaccaggcttttctccttattatgctccccagatccctggcgccctgcagagcgggtacctgcagcctatgtatggcatggaaggcctgttcccctacagccctgcactgtcgcaggccctgatggggctgtccccaggctccctactgcagcagtaccagcaataccagcagagtctgcaggaggcaattcagcagcagcagcagcggcaactacagcagcagcagcagcaaaaagtgcagcagcagcagcccaaagcaagccaaaccccagtcccccccggggctccttccccagacaaagaccctgccaaagaatcccccaaaccagaagaacagaaaaacaccccccgtgaggtgtcccccctcctgccgaaactccctgaagagccagaagcagaaagcaaaagtgcggactccctctacgaccccttcattgttccaaaggtgcagtacaagttggtctgccgcaagtgccaggcgggcttcagcgacgaggaggcagcgaggagccacctgaagtccctctgcttcttcggccagtctgtggtgaacctgcaagagatggtgcttcacgtccccaccggcggcggcggcggtggcagtggcggcggcggcggcggtggcggcggcggcggcggcggcggctcgtaccactgcctggcgtgcgagagcgcgctctgtggggaggaagctctgagtcaacatctcgagtcggccttgcacaaacacagaacaatcacgagagcagcaagaaacgccaaagagcaccctagtttattacctcactctgcctgcttccccgatcctagcaccgcatctacctcgcagtctgccgctcactcaaacgacagcccccctcccccgtcggccgccgccccctcctccgcttccccccacgcctccaggaagtcttggccgcaagtggtctcccgggcttcggcagcgaagcccccttcttttcctcctctctcctcatcttcaacggttacctcaagttcatgcagcacctcaggggttcagccctcgatgccaacagacgactattcggaggagtctgacacggatctcagccaaaagtccgacggaccggcgagcccggtggagggtcccaaagaccccagctgccccaaggacagtggtctgaccagtgtaggaacggacaccttcagattgtaa

SEQ ID NO: 228 - DNA, 1881 bp, Homo sapiens
atgaatgttgaagtagtaaaagtcatgccccaggacttagtgacattcaaggatgtggcaatagatttttcccaggaagaatggcaatggatgaaccctgctcagaagcgtttatacaggagtatgatgttggagaactatcagagcctggtatcacttggtctttgcatttctaagccatatgtgatctccttattggagcaagggagagagccttgggagatgacgagtgagatgacaagaagcccattctcagattgggaatctatatatgtgacacaggaattacctctgaagcagttcatgtatgatgatgcatgcatggagggaattactagctatggacttgagtgttccacttttgaagaaaattggaaatgggaagacctttttgagaagcagatgggaagtcatgagatgtttagcaagaaagaaataatcactcataaagaaaccatcactaaggaaacagaattcaaatatactaaatttgggaaatgtatccatctggaaaacatagaagagagtatttataatcacacatcagataaaaaaagcttctccaaaaattctatggtaataaaacacaagaaagtctatgtaggaaagaagctttttaaatgtaatgaatgtgacaaaaccttcacccatagctcatcccttactgttcattttagaattcatactggtgaaaaaccatatgcatgtgaggaatgtggaaaagccttcaagcaaaggcaacaccttgctcaacatcacagaacacatactggagagaaactctttgaatgtaaagaatgtaggaaagccttcaaacaaagtgaacaccttattcagcatcaaagaattcatactggagaaaaaccatataaatgtaaggaatgcagaaaagccttcagacagcctgcacaccttgctcagcatcagagaattcatactggagagaaaccctatgaatgtaaagaatgtggcaaagccttcagtgatggctcgtcttttgctcgacatcagagatgtcacactggcaaaagaccctatgaatgtattgagtgtgggaaggcttttaggtataacacatcttttattcgtcactggaggagttatcatactggagagaagccttttaattgcattgattgtgggaaagccttcagtgttcacataggacttattctgcataggagaattcatacaggagagaaaccttacaaatgtggtgtgtgtggaaaaaccttcagctcgggttcatcccgtactgtacatcagagaattcatacaggagagaaaccttatgaatgtgatatatgtgggaaagattttagccatcatgcatcactcactcagcatcaaagagtacattctggagagaaaccgtatgaatgcaaggaatgtgggaaagcctttaggcagaatgtacaccttgttagtcatttgagaattcatactggtgaaaaaccctatgaatgtaaagaatgtggaaaagcttttagaatcagttcacagctggctactcatcagagaattcatactggagagaagccttatgaatgtattgaatgtggaaatgctttcaaacagagatcacaccttgcccaacatcagaaaactcatacaggagagaaaccttatgagtgtaatgaatgcgggaaagccttcagccaaacttccaatcttactcaacatcaaagaattcatactggagagaaaccctataaatgtactgaatgtggaaaggcttttagtgatagctcatcctgtgctcagcatcaaagactccacactggccaaaggccctatcagtgttttgaatgtgggaaggcgttcagaagaaagttatccttaatttgtcatcaaagaagtcatactggagaagaaccttaa

SEQ ID NO: 229 - DNA, 1269 bp, Homo sapiens
atgttccagaccgcttggcgccaggaaccagtgacctttgaggatgtggctgtgtacttcacccagaatgaatgggccagcctggactctgtgcagagggccctgtacagggaagtgatgctggagaattatgcaaatgtggcttccctggcattcccattcaccacgcctgttctggtctcccagctggagcaaggggaactgccatggggcctcgatccctgggaacctatgggcagggaggctctcagaggtatctgtccaggggatgaggccagaactgagaaggaaggattaactccaaaggatcatgtgtccaaagaaacagagtccttcagactgatggtggggggcctgccagggaatgtttcccagcaccttgactttgggagcagcctagagcagccacaaggtcattggataattaagacaaagtcaaagaggagacatttcacagatacctcagccaggcaccatgaggcctatgaggtcaagaatggagagaagtttgagaaattaggaaaaaatattagcgtcagcacacaactcactacaaatcagacaaatcctagtggtcagatatcttatgaatgtggacaatgtggcagatatttcattcaaatggcagacttccaccgacatgagaaatgtcacactggtgaaaagtcttttgaatgcaaagaatgtggaaaatacttcagatataactcattacttattcggcatcagataattcacactggaaagaaaccatttaaatgtaaagaatgtggaaaaggtttaagttcagacacagccttgattcagcatcagagaatccacactggagaaaagccctatgaatgtaaggagtgcggcaaggccttcagtagcagctctgtcttcctccagcaccagaggttccacactggggagaagctctatgaatgtaacgaatgttggaaaactttcagttgcagctcaagtttcactgtccatcagcgaatgcacactggggagaaaccttatgaatgtaaagagtgtggaaaacgattaagctccaacacagccttgactcagcatcagcgaattcacactggggagaagccctttgaatgtaaggagtgtgggaaggcattcaatcagaaaataaccctgattcagcaccagcgagttcacactggcgagaaaccttatgagtgtaaagtgtgtggtaaaaccttcagctggtgtggaagattcattctgcatcagaaactacacactcagaagacacctgtccaagcatag

SEQ ID NO: 230 - DNA, 2172 bp, Homo sapiens
atgagtctcctcaaagagcggaagccaaaaaagccacattacatccccaggcctccaggaaagcccttcaagtataaatgtttccaatgtccctttacttgcaatgagaagtcacatctttttaatcacatgaagtatggtctttgtaaaaactcgattactttagtatcagagcaggatcgagttcccaagtgccctaaatctaactcactagaccccaagcaaaccaaccagcccgatgccacggcgaagccagcctcttccaagtctgtcgcaaatggactctctgccttcgactcgaagcttcagcacagctctgccagggaagacatcaaggaaaacctggagctgcaagcccggggaacccacaggtgcctgggacagaagccagccctccacagggcatcaccctgcaagagcccagctccggaagccgccctcggtgcccagcctgctctggaaggcgcagctcggccttctgcatttgttccagtcggcgagcacagactcaaggggccagacaacgccgaggcgcccgagacactggctttacacaaccccactgccaaggccgtgtctttccacaccaagtcggccttccacactcctggctacccctggaaagccggctcacctttccttccaccagagtttccacataaaatctcatctacaaaggggcttggggccatttccccttacatgcaccccacaatcccagagtacccgcctcacttttacacagagcacgggctggccaccatctactcgccttacctgctggctgggagctcgcctgagtgtgacgcacccctgctgtcagtctacggaacccaagacccgagacacttcctgcctcacccggggccgatccctaagcacctggctccatctccagccacatacgatcactacaggtttttccagcaatatccctctaacctgccgattccttacggattttacaggccagagtctgcattttcctcctatggtctcagactcccacctgtcactggcctcacccgagatcagagctctcacctgcttgaagaagccaccctggtctatccagcctcgagtccttccaggttaaacccttcggaccccaacagaaaacacgtcgagttcgaaagtccaattcctgaggctaaagactcctccaaggctgggcagagagacacggaagggtccaaaatgagcccccgcgcagggagtgcagccacgggctccccagggaggccgagccccaccgacttcatgcagacgagccagacctgcgaaggcctgtacgacctctccaacaaggcagcctccagcgcactgggaagactctacccgccagagcaaagcctcacagccttcaggcctgttaagaaaagcacagaatgcctacctgcccaggctgctgagaccacagcagagtctccagtaagcctcaatgttgtgaacggagaccctcctgctccgaccggaagcgcctctctcgtctcggaggccgcgccttccagtccggacgacagctccgggatgggccccctcaacctctccaagaaatcagagataaacctggcagccacccacgaacccacgtaccaaggcagcccccaggcggaaaccgccagcttctcagagctgcaggaccttccactcaatctctcggtgaaggacccctgtaacacccaggctccgaggcctgccttccccggtcgaccacgagctgcagaacctgctgctgctgttccacagaagactgggacagaaggttctgaggatgggcccagccaccctgagaccaagccaggcagcctcgacggtgacggggccccacccacaggccccggcgaggaggctccagacgcatgcgcggtggacagcagcgaggagcagaagcagacggcagccgtggccctgtgccagctggcggcctacagccccaggaacatccgggtgggcgatggggatgctgcggccccggaacctgcctgccggcaagacacacccacactgagctccatggagagccaagaggcccagtgtgacctcagacccaaaggacaaaagaggacaagtctaagggatgctggaaaatcccagcaaggagctaagaaggcgaagctgcaggacacggccagagtgttcacactacgaaggagggcccgggtgtcctaa

SEQ ID NO: 231 - DNA, 1878 bp, Homo sapiens
atgtggggaatgttgaatcgcaaggctcaagttacagggagcacactgaacggtaggaaagaaaaaattcaggctgaggaaggtgataaggaaaaatgggatttcctgcagtttgctgaagcttggactccaaatgacagttctgaagagttaaggaaggaagctttgttcactcacttcgaaaaagaaaaacagcatgatattcgatcattttttgtaccacaacctaaaaaaagacagttgatgacctcctgtgacgaatcaaagagattccgggaggaaaatactgtagtgtcatcagaccctacaaaaacagctgcaagagatatcatcgattatgaaagtgatgttgaacctgaaacgaaaagattgaaattggctgcctcggaagaccactgcagtccgtcggaagagacaccatcccagtccaagcaaatccgaactccactcgtggaaagtgtacaggaggccaaggcccagttaaccaccccagcctttcctgtagagggctggcaatgtagtctctgcacctatatcaataattcagagttaccttattgtgaaatgtgtgagactcctcaaggcagtgctgttatgcaaatagatagcctcaaccatatccaggataaaaacgagaaggatgattctcagaaagacacctccaaaaaggttcaaactatctcagactgtgaaaaacaagcccttgcacagtcagaacctggccagttggctgacagcaaggaagaaacaccaaaaattgagaaagaagacggacttacatcccagccaggtaatgaacagtggaagagttcagacactttgccagtgtatgacaccttaatgttctgtgcaagtaggaatactgaccggattcacatctatactaaggatggaaaacagatgagctgtaatttcattcctctggatataaaattagacctttgggaagatttaccagcaagctttcagctgaaacaatatcgctcactgattttgagatttgttcgagaatggagtagtctaactgccatgaagcaaaggataatcaggaaaagtggacagctattctgtagcccaattcttgctttggaagagatcacaaagcaacaaaccaaacaaaattgcaccaaaagatacataaccaaagaagatgttgccgtagcctcaatggacaaagtgaagaatgttgggggccatgtccgtctgatcacaaaggagtccaggccacgggatcctttcacaaaaaaacttcttgaagatggagcctgtgtcccatttctaaatccatacacagtccaggcagatctcactgtgaagccctctacatccaaaggctatttgcaagctgtggataatgaaggaaatccactttgccttcgctgtcagcaacccacttgccagactaagcaagcatgtaaagcgaactcttgggattcacggttttgctctctgaaatgtcaggaagagttttggattcgatctaataacagttacctgagagccaaagtatttgaaactgaacatggtgtgtgtcagctctgtaatgtgaacgcacaagaactctttttacgtctgagagatgcccctaaaagtcagaggaagaatcttctgtatgctacctggacttcaaagctcccattagaacagctaaatgaaatgataagaaacccaggggaaggacatttctggcaggtggatcacatcaagccagtgtatgggggaggaggacagtgttccctggacaacctgcagactctctgcacagtctgtcacaaagagagaactgccagacaagctaaggaaagaagccaggtgagaagacaatctctagcatcaaagcatggatcagacatcacacgatttttggtaaagaagtaa

1. A method for prediction of a specific type of cancer in a subject using an acquired bodily sample from said subject, said method comprising the steps of:
a) providing biological sequences derived from said bodily sample,
b) deriving the mutation status of specific genes that are mutated in cancer from said biological sequences compared to a normal sample,
c) calculating one or more of the following types of information i) to iii) from said biological sequences:
i) single base substitution frequency wherein the identity of the two bases flanking said substitution is not taken into account,
ii) single base substitution frequency in triplets of nucleotide bases, wherein the identity of the two bases flanking the substitution is taken into account,
iii) copy number variation (CNV) of genomic regions and/or genes compared to the copy number of the same regions and/or genes in a normal sample
d) calculating a classification score for the presence of each of a plurality of cancer types in said subject, wherein said classification score calculation is based on the mutation status derived from step b) in combination with the one or more of the information types i) to iii) being calculated in step c),
e) ranking the plurality of cancer types based on the classification score of step d), and
f) predicting the specific type of cancer in said subject based on the ranking of step e).

2) The method according to claim 1, wherein the method calculates said classification score based on a combination of the mutation status derived from step b) in combination with information types i) and/or ii) of step c), or based on a combination of the mutation status derived from step b) in combination with information type iii) of step c).

3) The method according to the preceding claims, wherein the method calculates said classification score based on a combination of the mutation status derived from step b) in combination with information type iii) and one or more of the information types i) and ii) of step c).

4) The method according to the preceding claims, wherein the method calculates said classification score based on a combination of the mutation status derived from step b) in combination with information types iii) and ii) of step c).

5) The method according to the preceding claims, wherein said biological sequence is a DNA and/or mRNA sequence obtained from said bodily sample.

6) The method according to the preceding claims, wherein both synonymous and non-synonymous mutations are used for deriving said mutation status, or wherein only non-synonymous mutations are used for deriving said mutation status.

7) The method according to the preceding claims, wherein the mutation status of step b) and/or information type iii) of step c) is based on mutation status or copy number variation of genes that are recurrently mutated in association with cancer, such as the set of genes encoding the sequences of SEQ ID NO: 1 to 231.

8) The method according to any of the preceding claims, wherein said method is computer-implemented and involves the use of at least one classifier or a plurality of classifiers that are based on a machine learning method, preferably selected from the group consisting of decision trees, random forests, stepwise additive logistic regression, artificial neural networks and support vector machines, and more preferably wherein the machine learning method is random forests.

9) The method according to any of the preceding claims, wherein the plurality of cancer types comprises or consists of at least the following types of cancer: breast, endometrium, kidney, large intestine, liver, lung, ovary, pancreas, prostate, and skin cancer.

10) The method according to any of the preceding claims, wherein the plurality of cancer types comprises or consists of at least the following types of cancer: breast, endometrium, kidney, large intestine, lung and ovary cancer.

11) The method according to any of the preceding claims, further comprising a step wherein a confidence score is calculated as the difference between the classification scores from the two highest ranking types of cancer.

12) The method according to any of the preceding claims, wherein the bodily sample is a bodily tissue sample such as a biopsy sample or a bodily fluid sample such as sample of blood, serum, plasma, urine, lymph fluid, sputum or bronchial washing fluid.

13) A computer program product having instructions which when executed by a computing device or system causes the computing device or system to carry out the method according to any one of claims 1 to 12.

14) A data-processing system having means for carrying out the method according to any one of claims 1 to 12.

15) A computer readable medium having stored thereon a computer program product according to claim 13.
